(19) United States
(12) Patent Application Publication
(10) Pub. No.: US 2023/0365965 A1
(43) Pub. Date: Nov. 16, 2023

(54) SERPINC1 iRNA COMPOSITIONS AND METHODS OF USE THEREOF

(71) Applicant: Genzyme Corporation, Cambridge, MA (US)

(72) Inventors: Akin Akinc, Needham Heights, MA (US); Alfica Sehgal, Belmont, MA (US); Ivanka Toudjarska, Medford, MA (US); Donald Foster, Attleboro, MA (US); Stuart Milstein, Arlington, MA (US); Brian Bettencourt, Groton, MA (US); Martin A. Maier, Belmont, MA (US); Klaus Charisse, Acton, MA (US); Satyanarayana Kuchimanchi, Acton, MA (US); Kallanthottathil G. Rajeev, Wayland, MA (US); Muthiah Manoharan, Weston, MA (US)

(73) Assignee: Genzyme Corporation, Cambridge, MA (US)

(21) Appl. No.: 18/155,655

(22) Filed: Jan. 17, 2023

Related U.S. Application Data
(63) Continuation of application No. 17/129,761, filed on Dec. 21, 2020, now abandoned.
Application No. 17/129,761 is a continuation of application No. 16/220,157, filed on Dec. 14, 2018, now abandoned.
Application No. 16/220,157 is a continuation of application No. 15/955,873, filed on Apr. 18, 2018, now abandoned.
Application No. 15/955,873 is a continuation of application No. 15/070,358, filed on Mar. 15, 2016, now abandoned.
Application No. 15/070,358 is a division of application No. 14/806,084, filed on Jul. 22, 2015, now Pat. No. 9,376,680.
Application No. 14/806,084 is a continuation of application No. 13/837,129, filed on Mar. 15, 2013, now Pat. No. 9,127,274.
(60) Provisional application No. 61/734,573, filed on Dec. 7, 2012.
(60) Provisional application No. 61/669,249, filed on Jul. 9, 2012.
(60) Provisional application No. 61/638,952, filed on Apr. 26, 2012.

(51) Int. Cl. C12N 15/113; A61K 31/713

(52) U.S. Cl. CPC C12N 15/113; A61K 31/713; C12N 2310/14; C12N 2310/315; C12N 2310/321; C12N 2310/322; C12N 2310/335; C12N 2310/3515; C12N 2310/351; C12N 2320/30; C12N 2310/3521; C12N 2310/3533

(57) ABSTRACT

The invention relates to iRNA, e.g., double-stranded ribonucleic acid (dsRNA), compositions targeting the Serpinc1 gene, and methods of using such iRNA, e.g., dsRNA, compositions to inhibit expression of Serpinc1 and methods of treating subjects having a bleeding disorder, such as a hemophilia.

### RELATED APPLICATIONS

[0001] This is a continuation of U.S. patent application Ser. No. 17/129,761, filed Dec. 21, 2020, which is a continuation of U.S. patent application Ser. No. 16/220,157, filed Dec. 14, 2018, which is a continuation of U.S. patent application Ser. No. 15/955,873, filed on Apr. 18, 2018, which is a continuation of U.S. patent application Ser. No. 15/070,358, filed on Mar. 15, 2016, which is a divisional of U.S. patent application Ser. No. 14/806,084, filed on Jul. 22, 2015, now U.S. Pat. No. 9,376,680, issued on Jun. 28, 2016, which is a continuation of U.S. patent application Ser. No. 13/837,129, filed on Mar. 15, 2013, now U.S. Pat. No. 9,127,274, issued on Sep. 8, 2015, which claims priority to U.S. Provisional Application No. 61/638,952, filed on Apr. 26, 2012, U.S. Provisional Application No. 61/669,249, filed on Jul. 9, 2012, and U.S. Provisional Application No. 61/734,573, filed on Dec. 7, 2012. The entire contents of each of the foregoing applications are incorporated herein by reference.

### SEQUENCE LISTING

[0002] The instant application contains a Sequence Listing which has been submitted in XML format via EFS-Web and is hereby incorporated by reference in its entirety. The electronic copy of the Sequence Listing, created on Jan. 10, 2023, is named 022548 C5081 SL.xml and is 2,732,240 bytes in size.

### BACKGROUND OF THE INVENTION

[0003] Serpinc1 is a member of the serine proteinase inhibitor (serpin) superfamily. Serpinc1 is a plasma protease inhibitor that inhibits thrombin as well as other activated serine proteases of the coagulation system, such as factors X, IX, XI, XII and VII and, thus, regulates the blood coagulation cascade (see, e.g., FIG. 1). The anticoagulant activity of Serpinc1 is enhanced by the presence of heparin and other related glycosaminoglycans which catalyze the formation of a thrombin:antithrombin (TAT) complexes.

[0004] Bleeding disorders, either inherited or acquired, are conditions in which there is inadequate blood clotting. For example, hemophilia is a group of hereditary genetic bleeding disorders that impair the body's ability to control blood clotting or coagulation. Hemophilia A is a recessive X-linked genetic disorder involving a lack of functional clotting Factor VIII and represents 80% of hemophilia cases. Hemophilia B is a recessive X-linked genetic disorder involving a lack of functional clotting Factor IX. It comprises approximately 20% of hemophilia cases. Hemophilia C is an autosomal genetic disorder involving a lack of functional clotting Factor XI. Hemophilia C is not completely recessive, as heterozygous individuals also show increased bleeding.

[0005] Although, at present there is no cure for hemophilia, it can be controlled with regular infusions of the deficient clotting factor, e.g., factor VIII in hemophilia A. However, some hemophiliacs develop antibodies (inhibitors) against the replacement factors given to them and, thus, become refractory to replacement coagulation factor. Accordingly, bleeds in such subjects cannot be properly controlled.

[0006] The development of high-titer inhibitors to, for example, factor VIII and other coagulation factors, is the most serious complication of hemophilia therapy and makes treatment of bleeds very challenging. Currently, the only strategies to stop bleeds in such subjects are the use of “bypassing agents” such as factor eight inhibitor bypass activity (FEIBA) and activated recombinant factor VII (rFVIIa), plasmapheresis, continuous factor replacement, and immune tolerance therapy, none of which are completely effective. Accordingly, there is a need in the art for alternative treatments for subjects having a bleeding disorder, such as hemophilia.

### SUMMARY OF THE INVENTION

[0007] The present invention provides iRNA compositions which effect the RNA-induced silencing complex (RISC)-mediated cleavage of RNA transcripts of a Serpinc1 gene. The Serpinc1 gene may be within a cell, e.g., a cell within a subject, such as a human. The present invention also provides methods of using and uses of the iRNA compositions of the invention for inhibiting the expression of a Serpinc1 gene and/or for treating a subject having a disorder that would benefit from inhibiting or reducing the expression of a Serpinc1 gene, e.g., a bleeding disorder, such as hemophilia.

[0008] Accordingly, in one aspect, the present invention provides double-stranded ribonucleic acids (dsRNAs) for inhibiting expression of Serpinc1. The dsRNAs comprise a sense strand and an antisense strand, wherein the sense strand comprises at least 15 contiguous nucleotides differing by no more than 3 nucleotides from the nucleotide sequence of SEQ ID NO:1 and the antisense strand comprises at least 15 contiguous nucleotides differing by no more than 3 nucleotides from the nucleotide sequence of SEQ ID NO:5.

[0009] In another aspect, the present invention provides double-stranded ribonucleic acids (dsRNAs) for inhibiting expression of Serpinc1. The dsRNAs comprise a sense strand and an antisense strand, the antisense strand comprising a region of complementarity which comprises at least 15 contiguous nucleotides differing by no more than 3 nucleotides from any one of the antisense sequences listed in any one of Tables 3, 4, 8, 11, 12, 14, 15, 20, and 21.

[0010] In one embodiment, the sense and antisense strands comprise sequences selected from the group consisting of AD-50487.1, AD-50477.1, AD-50483.1, AD-50475.1, AD-50495.1, AD-50476.1, AD-50499.1, AD-50478.1, AD-50489.1, AD-50501.1, AD-50507.1, AD-50484.1, AD-50515.1, AD-50540.1, AD-50528.1, AD-50549.1, AD-50539.1, AD-50534.1, AD-50527.1, AD-50514.1, AD-50509.1, AD-50529.1, AD-54944, AD-56813, AD-57205, AD-57214, and AD-57213 of any one of Tables 3, 4, 8, 11, 12, 14, 15, 20, and 21. In certain embodiments of the invention, the dsRNAs comprise at least one modified nucleotide. In one embodiment, at least one of the modified nucleotides is selected from the group consisting of a 2′-O-methyl modified nucleotide, a nucleotide comprising a 5′-phosphorothioate group, and a terminal nucleotide linked to a cholesteryl derivative or a dodecanoic acid bisdecylamide group. In another embodiment, the modified nucleotide is selected from the group consisting of a 2′-deoxy-2′-fluoro modified nucleotide, a 2′-deoxy-modified nucleotide, a locked nucleotide, an abasic nucleotide, a 2′-amino-modified nucleotide, a 2′-alkyl-modified nucleotide, a morpholino nucleotide, a phosphoramidate, and a non-natural base comprising nucleotide.

[0011] The region of complementarity of the dsRNAs may be at least 17 nucleotides in length, between 19 and 21 nucleotides in length, or 19 nucleotides in length.

[0012] In one embodiment, each strand of a dsRNA is no more than 30 nucleotides in length.

[0013] At least one strand of a dsRNA may comprise a 3′ overhang of at least 1 nucleotide or at least 2 nucleotides.

[0014] In certain embodiments, a dsRNA further comprises a ligand. In one embodiment, the ligand is conjugated to the 3′ end of the sense strand of the dsRNA.

[0015] In some embodiments, the ligand is one or more N-acetylgalactosamine (GalNAc) derivatives attached through a bivalent or trivalent branched linker. In particular embodiments, the ligand is

[chemical structure]

[0016] In some embodiments, the RNAi agent is conjugated to the ligand as shown in the following schematic

[chemical structure]

[0017] In another embodiment, the RNAi agent is conjugated to the ligand as shown in the following schematic, wherein X is O or S.

[chemical structure]

[0018] In one embodiment, the region of complementarity of a dsRNA consists of one of the antisense sequences of any one of Tables 3, 4, 8, 11, 12, 14, 15, 20, and 21.

[0019] In another embodiment, a dsRNA comprises a sense strand consisting of a sense strand sequence selected from the sequences of any one of Tables 3, 4, 8, 11, 12, 14, 15, 20, and 21, and an antisense strand consisting of an antisense sequence selected from the sequences of any one of Tables 3, 4, 8, 11, 12, 14, 15, 20, and 21.

[0020] In another aspect, the present invention provides a cell containing a dsRNA of the invention.

[0021] In yet another aspect, the present invention provides a vector encoding at least one strand of a dsRNA, wherein the dsRNA comprises a region of complementarity to at least a part of an mRNA encoding Serpinc1, wherein the dsRNA is 30 base pairs or less in length, and wherein the dsRNA targets the mRNA for cleavage.

[0022] The region of complementarity may be least 15 nucleotides in length or 19 to 21 nucleotides in length.

[0023] In a further aspect, the present invention provides a cell comprising a vector encoding at least one strand of a dsRNA, wherein the dsRNA comprises a region of complementarity to at least a part of an mRNA encoding Serpinc1, wherein the dsRNA is 30 base pairs or less in length, and wherein the dsRNA targets the mRNA for cleavage.

[0024] In one aspect, the present invention provides a pharmaceutical composition for inhibiting expression of a Serpinc1 gene comprising a dsRNA or vector of the invention.

[0025] In one embodiment, the pharmaceutical composition further comprises a lipid formulation, such as an MC3, SNALP, or XTC formulation.

[0026] In another aspect, the present invention provides methods of inhibiting Serpinc1 expression in a cell. The methods include contacting the cell with the dsRNA or a vector of the invention, and maintaining the cell produced for a time sufficient to obtain degradation of the mRNA transcript of a Serpinc1 gene, thereby inhibiting expression of the Serpinc1 gene in the cell.

[0027] The cell may be within a subject, such as a human subject, for example a human subject suffering from a bleeding disorder, e.g., a hemophilia.

[0028] In one embodiment of the methods of the invention, Serpinc1 expression is inhibited by at least about 30%, at least about 35%, at least about 40%, at least about 45%, at least about 50%, at least about 55%, at least about 60%, at least about 65%, at least about 70%, at least about 75%, at least about 80%, at least about 85%, at least about 90%, at least about 91%, at least about 92%, at least about 93%, at least about 94%, at least about 95%, at least about 96%, at least about 97%, at least about 98%, or at least about 99%.

[0029] In another aspect, the present invention provides methods of treating a subject having a disorder that would benefit from reduction in Serpinc1 expression, e.g., a bleeding disorder, such as a hemophilia. The methods include administering to the subject a therapeutically effective amount of the dsRNA or vector of the invention, thereby treating the subject.

[0030] In one aspect, the invention provides methods of preventing at least one symptom, e.g., bleeding, in a subject having a disorder that would benefit from reduction in Serpinc1 expression, e.g., hemophilia. The methods include administering to the subject a therapeutically effective amount of the iRNA, e.g., dsRNA, or vector of the invention, thereby preventing at least one symptom in the subject having a disorder that would benefit from reduction in Serpinc1 expression.

[0031] The disorder may be a bleeding disorder, such as a hemophilia.

[0032] In one embodiment, the administration of the dsRNA to the subject causes an increase in blood clotting and/or a decrease in Serpinc1 protein expression and/or accumulation.

[0033] In one embodiment, the dsRNA is conjugated to a ligand, e.g., at the 3′-end of the sense strand of the dsRNA. In one embodiment the ligand is an N-acetylgalactosamine (GalNAc) derivative.

[0034] In one embodiment, the dsRNA is administered at a dose of about 0.01 mg/kg to about 10 mg/kg, e.g., about 0.05 mg/kg to about 5 mg/kg, about 0.05 mg/kg to about 10 mg/kg, about 0.1 mg/kg to about 5 mg/kg, about 0.1 mg/kg to about 10 mg/kg, about 0.2 mg/kg to about 5 mg/kg, about 0.2 mg/kg to about 10 mg/kg, about 0.3 mg/kg to about 5 mg/kg, about 0.3 mg/kg to about 10 mg/kg, about 0.4 mg/kg to about 5 mg/kg, about 0.4 mg/kg to about 10 mg/kg, about 0.5 mg/kg to about 5 mg/kg, about 0.5 mg/kg to about 10 mg/kg, about 1 mg/kg to about 5 mg/kg, about 1 mg/kg to about 10 mg/kg, about 1.5 mg/kg to about 5 mg/kg, about 1.5 mg/kg to about 10 mg/kg, about 2 mg/kg to about 2.5 mg/kg, about 2 mg/kg to about 10 mg/kg, about 3 mg/kg to about 5 mg/kg, about 3 mg/kg to about 10 mg/kg, about 3.5 mg/kg to about 5 mg/kg, about 4 mg/kg to about 5 mg/kg, about 4.5 mg/kg to about 5 mg/kg, about 4 mg/kg to about 10 mg/kg, about 4.5 mg/kg to about 10 mg/kg, about 5 mg/kg to about 10 mg/kg, about 5.5 mg/kg to about 10 mg/kg, about 6 mg/kg to about 10 mg/kg, about 6.5 mg/kg to about 10 mg/kg, about 7 mg/kg to about 10 mg/kg, about 7.5 mg/kg to about 10 mg/kg, about 8 mg/kg to about 10 mg/kg, about 8.5 mg/kg to about 10 mg/kg, about 9 mg/kg to about 10 mg/kg, or about 9.5 mg/kg to about 10 mg/kg. Values and ranges intermediate to the recited values are also intended to be part of this invention.

[0035] For example, the dsRNA may be administered at a dose of about 0.01, 0.02, 0.03, 0.04, 0.05, 0.06, 0.07, 0.08, 0.09, 0.1, 0.2, 0.3, 0.4, 0.5, 0.6, 0.7, 0.8, 0.9, 1, 1.1, 1.2, 1.3, 1.4, 1.5, 1.6, 1.7, 1.8, 1.9, 2, 2.1, 2.2, 2.3, 2.4, 2.5, 2.6, 2.7, 2.8, 2.9, 3, 3.1, 3.2, 3.3, 3.4, 3.5, 3.6, 3.7, 3.8, 3.9, 4, 4.1, 4.2, 4.3, 4.4, 4.5, 4.6, 4.7, 4.8, 4.9, 5, 5.1, 5.2, 5.3, 5.4, 5.5, 5.6, 5.7, 5.8, 5.9, 6, 6.1, 6.2, 6.3, 6.4, 6.5, 6.6, 6.7, 6.8, 6.9, 7, 7.1, 7.2, 7.3, 7.4, 7.5, 7.6, 7.7, 7.8, 7.9, 8, 8.1, 8.2, 8.3, 8.4, 8.5, 8.6, 8.7, 8.8, 8.9, 9, 9.1, 9.2, 9.3, 9.4, 9.5, 9.6, 9.7, 9.8, 9.9, or about 10 mg/kg. Values and ranges intermediate to the recited values are also intended to be part of this invention.

[0036] In another embodiment, the dsRNA is administered at a dose of about 0.5 to about 50 mg/kg, about 0.75 to about 50 mg/kg, about 1 to about 50 mg/kg, about 1.5 to about 50 mg/kg, about 2 to about 50 mg/kg, about 2.5 to about 50 mg/kg, about 3 to about 50 mg/kg, about 3.5 to about 50 mg/kg, about 4 to about 50 mg/kg, about 4.5 to about 50 mg/kg, about 5 to about 50 mg/kg, about 7.5 to about 50 mg/kg, about 10 to about 50 mg/kg, about 15 to about 50 mg/kg, about 20 to about 50 mg/kg, about 20 to about 50 mg/kg, about 25 to about 50 mg/kg, about 25 to about 50 mg/kg, about 30 to about 50 mg/kg, about 35 to about 50 mg/kg, about 40 to about 50 mg/kg, about 45 to about 50 mg/kg, about 0.5 to about 45 mg/kg, about 0.75 to about 45 mg/kg, about 1 to about 45 mg/kg, about 1.5 to about 45 mg/kg, about 2 to about 45 mg/kg, about 2.5 to about 45 mg/kg, about 3 to about 45 mg/kg, about 3.5 to about 45 mg/kg, about 4 to about 45 mg/kg, about 4.5 to about 45 mg/kg, about 5 to about 45 mg/kg, about 7.5 to about 45 mg/kg, about 10 to about 45 mg/kg, about 15 to about 45 mg/kg, about 20 to about 45 mg/kg, about 20 to about 45 mg/kg, about 25 to about 45 mg/kg, about 25 to about 45 mg/kg, about 30 to about 45 mg/kg, about 35 to about 45 mg/kg, about 40 to about 45 mg/kg, about 0.5 to about 40 mg/kg, about 0.75 to about 40 mg/kg, about 1 to about 40 mg/kg, about 1.5 to about 40 mg/kg, about 2 to about 40 mg/kg, about 2.5 to about 40 mg/kg, about 3 to about 40 mg/kg, about 3.5 to about 40 mg/kg, about 4 to about 40 mg/kg, about 4.5 to about 40 mg/kg, about 5 to about 40 mg/kg, about 7.5 to about 40 mg/kg, about 10 to about 40 mg/kg, about 15 to about 40 mg/kg, about 20 to about 40 mg/kg, about 20 to about 40 mg/kg, about 25 to about 40 mg/kg, about 25 to about 40 mg/kg, about 30 to about 40 mg/kg, about 35 to about 40 mg/kg, about 0.5 to about 30 mg/kg, about 0.75 to about 30 mg/kg, about 1 to about 30 mg/kg, about 1.5 to about 30 mg/kg, about 2 to about 30 mg/kg, about 2.5 to about 30 mg/kg, about 3 to about 30 mg/kg, about 3.5 to about 30 mg/kg, about 4 to about 30 mg/kg, about 4.5 to about 30 mg/kg, about 5 to about 30 mg/kg, about 7.5 to about 30 mg/kg, about 10 to about 30 mg/kg, about 15 to about 30 mg/kg, about 20 to about 30 mg/kg, about 20 to about 30 mg/kg, about 25 to about 30 mg/kg, about 0.5 to about 20 mg/kg, about 0.75 to about 20 mg/kg, about 1 to about 20 mg/kg, about 1.5 to about 20 mg/kg, about 2 to about 20 mg/kg, about 2.5 to about 20 mg/kg, about 3 to about 20 mg/kg, about 3.5 to about 20 mg/kg, about 4 to about 20 mg/kg, about 4.5 to about 20 mg/kg, about 5 to about 20 mg/kg, about 7.5 to about 20 mg/kg, about 10 to about 20 mg/kg, or about 15 to about 20 mg/kg. Values and ranges intermediate to the recited values are also intended to be part of this invention.

[0037] For example, subjects can be administered a therapeutic amount of iRNA, such as about 0.5, 0.6, 0.7, 0.8, 0.9, 1, 1.1, 1.2, 1.3, 1.4, 1.5, 1.6, 1.7, 1.8, 1.9, 2, 2.1, 2.2, 2.3, 2.4, 2.5, 2.6, 2.7, 2.8, 2.9, 3, 3.1, 3.2, 3.3, 3.4, 3.5, 3.6, 3.7, 3.8, 3.9, 4, 4.1, 4.2, 4.3, 4.4, 4.5, 4.6, 4.7, 4.8, 4.9, 5, 5.1, 5.2, 5.3, 5.4, 5.5, 5.6, 5.7, 5.8, 5.9, 6, 6.1, 6.2, 6.3, 6.4, 6.5, 6.6, 6.7, 6.8, 6.9, 7, 7.1, 7.2, 7.3, 7.4, 7.5, 7.6, 7.7, 7.8, 7.9, 8, 8.1, 8.2, 8.3, 8.4, 8.5, 8.6, 8.7, 8.8, 8.9, 9, 9.1, 9.2, 9.3, 9.4, 9.5, 9.6, 9.7, 9.8, 9.9, 10, 10.5, 11, 11.5, 12, 12.5, 13, 13.5, 14, 14.5, 15, 15.5, 16, 16.5, 17, 17.5, 18, 18.5, 19, 19.5, 20, 20.5, 21, 21.5, 22, 22.5, 23, 23.5, 24, 24.5, 25, 25.5, 26, 26.5, 27, 27.5, 28, 28.5, 29, 29.5, 30, 31, 32, 33, 34, 34, 35, 36, 37, 38, 39, 40, 41, 42, 43, 44, 45, 46, 47, 48, 49, or about 50 mg/kg. Values and ranges intermediate to the recited values are also intended to be part of this invention.

[0038] The dsRNA, e.g., conjugated to a ligand, may be administered to the subject once a week or twice a month.

[0039] In another aspect, the present invention provides methods of inhibiting the expression of Serpinc1 in a subject. The methods include administering to the subject a therapeutically effective amount of the dsRNA or a vector of the invention, thereby inhibiting the expression of Serpinc1 in the subject.

[0040] In one embodiment, the dsRNA is conjugated to a ligand, e.g., at the 3′-end of the sense strand of the dsRNA. In one embodiment the ligand is an N-acetylgalactosamine (GalNAc) derivative.

[0041] In one embodiment, the dsRNA is administered at a dose of about 0.01 mg/kg to about 10 mg/kg, e.g., about 0.05 mg/kg to about 5 mg/kg, about 0.05 mg/kg to about 10 mg/kg, about 0.1 mg/kg to about 5 mg/kg, about 0.1 mg/kg to about 10 mg/kg, about 0.2 mg/kg to about 5 mg/kg, about 0.2 mg/kg to about 10 mg/kg, about 0.3 mg/kg to about 5 mg/kg, about 0.3 mg/kg to about 10 mg/kg, about 0.4 mg/kg to about 5 mg/kg, about 0.4 mg/kg to about 10 mg/kg, about 0.5 mg/kg to about 5 mg/kg, about 0.5 mg/kg to about 10 mg/kg, about 1 mg/kg to about 5 mg/kg, about 1 mg/kg to about 10 mg/kg, about 1.5 mg/kg to about 5 mg/kg, about 1.5 mg/kg to about 10 mg/kg, about 2 mg/kg to about 2.5 mg/kg, about 2 mg/kg to about 10 mg/kg, about 3 mg/kg to about 5 mg/kg, about 3 mg/kg to about 10 mg/kg, about 3.5 mg/kg to about 5 mg/kg, about 4 mg/kg to about 5 mg/kg, about 4.5 mg/kg to about 5 mg/kg, about 4 mg/kg to about 10 mg/kg, about 4.5 mg/kg to about 10 mg/kg, about 5 mg/kg to about 10 mg/kg, about 5.5 mg/kg to about 10 mg/kg, about 6 mg/kg to about 10 mg/kg, about 6.5 mg/kg to about 10 mg/kg, about 7 mg/kg to about 10 mg/kg, about 7.5 mg/kg to about 10 mg/kg, about 8 mg/kg to about 10 mg/kg, about 8.5 mg/kg to about 10 mg/kg, about 9 mg/kg to about 10 mg/kg, or about 9.5 mg/kg to about 10 mg/kg. Values and ranges intermediate to the recited values are also intended to be part of this invention.

[0042] For example, the dsRNA may be administered at a dose of about 0.01, 0.02, 0.03, 0.04, 0.05, 0.06, 0.07, 0.08, 0.09, 0.1, 0.2, 0.3, 0.4, 0.5, 0.6, 0.7, 0.8, 0.9, 1, 1.1, 1.2, 1.3, 1.4, 1.5, 1.6, 1.7, 1.8, 1.9, 2, 2.1, 2.2, 2.3, 2.4, 2.5, 2.6, 2.7, 2.8, 2.9, 3, 3.1, 3.2, 3.3, 3.4, 3.5, 3.6, 3.7, 3.8, 3.9, 4, 4.1, 4.2, 4.3, 4.4, 4.5, 4.6, 4.7, 4.8, 4.9, 5, 5.1, 5.2, 5.3, 5.4, 5.5, 5.6, 5.7, 5.8, 5.9, 6, 6.1, 6.2, 6.3, 6.4, 6.5, 6.6, 6.7, 6.8, 6.9, 7, 7.1, 7.2, 7.3, 7.4, 7.5, 7.6, 7.7, 7.8, 7.9, 8, 8.1, 8.2, 8.3, 8.4, 8.5, 8.6, 8.7, 8.8, 8.9, 9, 9.1, 9.2, 9.3, 9.4, 9.5, 9.6, 9.7, 9.8, 9.9, or about 10 mg/kg. Values and ranges intermediate to the recited values are also intended to be part of this invention.

[0043] In another embodiment, the dsRNA is administered at a dose of about 0.5 to about 50 mg/kg, about 0.75 to about 50 mg/kg, about 1 to about 50 mg/kg, about 1.5 to about 50 mg/kg, about 2 to about 50 mg/kg, about 2.5 to about 50 mg/kg, about 3 to about 50 mg/kg, about 3.5 to about 50 mg/kg, about 4 to about 50 mg/kg, about 4.5 to about 50 mg/kg, about 5 to about 50 mg/kg, about 7.5 to about 50 mg/kg, about 10 to about 50 mg/kg, about 15 to about 50 mg/kg, about 20 to about 50 mg/kg, about 20 to about 50 mg/kg, about 25 to about 50 mg/kg, about 25 to about 50 mg/kg, about 30 to about 50 mg/kg, about 35 to about 50 mg/kg, about 40 to about 50 mg/kg, about 45 to about 50 mg/kg, about 0.5 to about 45 mg/kg, about 0.75 to about 45 mg/kg, about 1 to about 45 mg/kg, about 1.5 to about 45 mg/kg, about 2 to about 45 mg/kg, about 2.5 to about 45 mg/kg, about 3 to about 45 mg/kg, about 3.5 to about 45 mg/kg, about 4 to about 45 mg/kg, about 4.5 to about 45 mg/kg, about 5 to about 45 mg/kg, about 7.5 to about 45 mg/kg, about 10 to about 45 mg/kg, about 15 to about 45 mg/kg, about 20 to about 45 mg/kg, about 20 to about 45 mg/kg, about 25 to about 45 mg/kg, about 25 to about 45 mg/kg, about 30 to about 45 mg/kg, about 35 to about 45 mg/kg, about 40 to about 45 mg/kg, about 0.5 to about 40 mg/kg, about 0.75 to about 40 mg/kg, about 1 to about 40 mg/kg, about 1.5 to about 40 mg/kg, about 2 to about 40 mg/kg, about 2.5 to about 40 mg/kg, about 3 to about 40 mg/kg, about 3.5 to about 40 mg/kg, about 4 to about 40 mg/kg, about 4.5 to about 40 mg/kg, about 5 to about 40 mg/kg, about 7.5 to about 40 mg/kg, about 10 to about 40 mg/kg, about 15 to about 40 mg/kg, about 20 to about 40 mg/kg, about 20 to about 40 mg/kg, about 25 to about 40 mg/kg, about 25 to about 40 mg/kg, about 30 to about 40 mg/kg, about 35 to about 40 mg/kg, about 0.5 to about 30 mg/kg, about 0.75 to about 30 mg/kg, about 1 to about 30 mg/kg, about 1.5 to about 30 mg/kg, about 2 to about 30 mg/kg, about 2.5 to about 30 mg/kg, about 3 to about 30 mg/kg, about 3.5 to about 30 mg/kg, about 4 to about 30 mg/kg, about 4.5 to about 30 mg/kg, about 5 to about 30 mg/kg, about 7.5 to about 30 mg/kg, about 10 to about 30 mg/kg, about 15 to about 30 mg/kg, about 20 to about 30 mg/kg, about 20 to about 30 mg/kg, about 25 to about 30 mg/kg, about 0.5 to about 20 mg/kg, about 0.75 to about 20 mg/kg, about 1 to about 20 mg/kg, about 1.5 to about 20 mg/kg, about 2 to about 20 mg/kg, about 2.5 to about 20 mg/kg, about 3 to about 20 mg/kg, about 3.5 to about 20 mg/kg, about 4 to about 20 mg/kg, about 4.5 to about 20 mg/kg, about 5 to about 20 mg/kg, about 7.5 to about 20 mg/kg, about 10 to about 20 mg/kg, or about 15 to about 20 mg/kg. Values and ranges intermediate to the recited values are also intended to be part of this invention.

[0044] For example, subjects can be administered a therapeutic amount of iRNA, such as about 0.5, 0.6, 0.7. 0.8, 0.9, 1, 1.1, 1.2, 1.3, 1.4, 1.5, 1.6, 1.7, 1.8, 1.9, 2, 2.1, 2.2, 2.3, 2.4, 2.5, 2.6, 2.7, 2.8, 2.9, 3, 3.1, 3.2, 3.3, 3.4, 3.5, 3.6, 3.7, 3.8, 3.9, 4, 4.1, 4.2, 4.3, 4.4, 4.5, 4.6, 4.7, 4.8, 4.9, 5, 5.1, 5.2, 5.3, 5.4, 5.5, 5.6, 5.7, 5.8, 5.9, 6, 6.1, 6.2, 6.3, 6.4, 6.5, 6.6, 6.7, 6.8, 6.9, 7, 7.1, 7.2, 7.3, 7.4, 7.5, 7.6, 7.7, 7.8, 7.9, 8, 8.1, 8.2, 8.3, 8.4, 8.5, 8.6, 8.7, 8.8, 8.9, 9, 9.1, 9.2, 9.3, 9.4, 9.5, 9.6, 9.7, 9.8, 9.9, 10, 10.5, 11, 11.5, 12, 12.5, 13, 13.5, 14, 14.5, 15, 15.5, 16, 16.5, 17, 17.5, 18, 18.5, 19, 19.5, 20, 20.5, 21, 21.5, 22, 22.5, 23, 23.5, 24, 24.5, 25, 25.5, 26, 26.5, 27, 27.5, 28, 28.5, 29, 29.5, 30, 31, 32, 33, 34, 34, 35, 36, 37, 38, 39, 40, 41, 42, 43, 44, 45, 46, 47, 48, 49, or about 50 mg/kg. Values and ranges intermediate to the recited values are also intended to be part of this invention.

[0045] The dsRNA, e.g., conjugated to a ligand, may be administered to the subject once a week or twice a month.

[0046] In yet another aspect, the invention provides kits for performing the methods of the invention. In one embodiment, the invention provides a kit for performing a method of inhibiting expression of Serpinc1 in a cell by contacting a cell with a double stranded RNAi agent in an amount effective to inhibit expression of the Serpinc1 gene in the cell. The kit comprises an RNAi agent and instructions for use and, optionally, means for administering the RNAi agent to a subject.

### BRIEF DESCRIPTION OF THE DRAWINGS

[0047] FIG. 1 is a schematic of the blood coagulation cascade.

[0048] FIG. 2A is a graph showing the inhibition of Serpinc1 expression in Hep3B cells following a single dose of the indicated iRNAs.

[0049] FIG. 2B is a graph showing the inhibition of Serpinc1 expression in Hep3B cells following a single dose of the indicated iRNAs.

[0050] FIG. 3A is a graph showing the inhibition of Serpinc1 mRNA expression in CD-1 mice following a single dose, as indicated, of an LNP formulation of AD-50509 or AD-1955.

[0051] FIG. 3B is a graph showing the inhibition of Serpinc1 protein expression in CD-1 mice following a single dose, as indicated, of an LNP formulation of AD-50509 or AD-1955.

[0052] FIG. 4A is a graph showing the duration of inhibition of Serpinc1 mRNA expression in CD-1 mice following a single 1 mg/kg dose of an LNP formulation of AD-50509 or AD-1955.

[0053] FIG. 4B is a graph showing the duration of inhibition of Serpinc1 mRNA protein expression in CD-1 mice following a single 1 mg/kg dose of an LNP formulation of AD-50509 or AD-1955.

[0054] FIG. 4C is a graph showing the inhibition of Serpinc1 activity and Serpinc1 protein expression in CD1 mice following a single 1 mg/kg dose of an LNP formulation of AD-50509 or AD-1955.

[0055] FIG. 5 is a graph showing the percent knock-down of Serpinc1 mRNA and protein levels following a single 10 mg/kg dose of the indicated iRNA conjugated to GalNAc.

[0056] FIG. 6 is a graph showing the inhibition of Serpinc1 protein expression in C57BL/6 mice following a single 5 mg/kg, 10 mg/kg, 25 mg/kg, 50 mg/kg, and 75 mg/kg, and a repeat dose of 5×5 mg/kg of AD-54944 conjugated to GalNAc.

[0057] FIG. 7A is a graph showing the effect of repeat-dosing on the duration of inhibition of Serpinc1 protein expression in C57BL/6 mice of GalNAc conjugated AD-54944.

[0058] FIG. 7B is a graph showing the effect of repeat-dosing on the duration of inhibition of Serpinc1 protein expression in C57BL/6 mice of GalNAc conjugated AD-54944.

[0059] FIG. 8 is a graph showing the effects of the indicated split-dosing regimens on the duration of silencing of Serpinc1 protein expression in C57BL/6 mice administered GalNAc conjugated AD-54944.

[0060] FIG. 9 is a graph showing the effects of the indicated split-dosing regimens on the duration of silencing of Serpinc1 protein expression in C57BL/6 mice administered GalNAc conjugated AD-54944.

[0061] FIG. 10A is a graph showing the percent knock-down of Serpinc1 protein levels following a single 10 mg/kg dose of the indicated iRNA conjugated to GalNAc.

[0062] FIG. 10B is a graph showing the percent knock-down of Serpinc1 protein levels following a single 3 mg/kg dose of the indicated iRNA conjugated to GalNAc.

[0063] FIG. 11 is a graph showing the percent knock-down of Serpinc1 protein levels following a single 10 mg/kg or 3 mg/kg dose of the indicated iRNA conjugated to GalNAc.

[0064] FIG. 12 is a graph showing the percent knock-down of Serpinc1 activity following a single 10 mg/kg or 3 mg/kg dose of the indicated iRNA conjugated to GalNAc.

[0065] FIG. 13 is a graph showing a dose effect response to a single dose of AD-57213.

[0066] FIG. 14 is a graph showing the duration of silencing of Serpinc1 with AD-57213 following a single dose of 1 mg/kg, 3 mg/kg or 10 mg/kg in Hemophilia A mice.

[0067] FIG. 15 is a graph showing the inhibition of Serpinc1 mRNA expression in C57BL/6 mice following a single 30 mg/kg, 10 mg/kg, 3 mg/kg, 1 mg/kg, and 0.3 mg/kg dose of AD-57213.

[0068] FIG. 16A is a graph showing the duration of silencing of Serpinc1 with AD-57213 following a single dose as indicated.

[0069] FIG. 16B is a graph showing the duration of silencing of Serpinc1 with AD-57205 following a single dose as indicated.

[0070] FIG. 16C is a graph showing the duration of silencing of Serpinc1 with AD-57214 following a single dose as indicated.

[0071] FIG. 17 is a graph showing the effects of the indicated split-dosing regimens on the duration of silencing of Serpinc1 protein expression in C57BL/6 mice administered GalNAc conjugated AD-57213.

[0072] FIG. 18 is a graph showing the effects of the indicated split-dosing regimens on the duration of silencing of Serpinc1 protein expression in C57BL/6 mice administered GalNAc conjugated AD-57213.

[0073] FIG. 19 is a graph showing the effects of the indicated split-dosing regimens on the duration of silencing of Serpinc1 protein expression in C57BL/6 mice administered GalNAc conjugated AD-57213.

[0074] FIG. 20 is a graph showing the effects of the single dose screen of the indicated compounds on the duration of Serpinc1 protein expression in non-human primates.

[0075] FIG. 21 is a graph showing the effects of the single dose screen of AD-57213 conjugated to GalNAc on the duration of Serpinc1 protein expression in non-human primates.

[0076] FIG. 22 is a graph showing the effects of the single dose screen of the indicated compounds on the duration of Serpinc1 protein expression in non-human primates.

[0077] FIG. 23 is a graph showing the effects of the single dose of compound AD-57213 on serum antithrombin (Serpinc1) levels in non-human primates.

[0078] FIG. 24A is a graph showing the effects of the single dose of compound AD-57213 at 1 mg/kg on the relationship between serum antithrombin (Serpinc1) levels and fold change in peak plasma thrombin levels in non-human primates. Fold change in peak thrombin is depicted on the secondary y-axis (grey) and relative antithrombin level is depicted on the primary y-axis (black).

[0079] FIG. 24B is a graph showing the effects of the single dose of compound AD-57213 at 3 mg/kg on the relationship between serum antithrombin (Serpinc1) levels and fold change in peak plasma thrombin levels in non-human primates. Fold change in peak thrombin is depicted on the secondary y-axis (grey) and relative antithrombin level is depicted on the primary y-axis (black).

[0080] FIG. 24C is a graph showing the effects of the single dose of compound AD-57213 at 10 mg/kg on the relationship between serum antithrombin (Serpinc1) levels and fold change in peak plasma thrombin levels in non-human primates. Fold change in peak thrombin is depicted on the secondary y-axis (grey) and relative antithrombin level is depicted on the primary y-axis (black).

[0081] FIG. 24D is a graph showing the effects of the single dose of compound AD-57213 at 30 mg/kg on the relationship between serum antithrombin (Serpinc1) levels and fold change in peak plasma thrombin levels in non-human primates. Fold change in peak thrombin is depicted on the secondary y-axis (grey) and relative antithrombin level is depicted on the primary y-axis (black).

[0082] FIG. 25 is a graph showing the effects of AD-57213 as a fold change increase in peak thrombin as a function of relative antithrombin (Serpinc1) silencing.

[0083] FIG. 26A is a graph showing the cumulative effects of Serpinc1 silencing in non-human primates.

[0084] FIG. 26B is a graph showing the cumulative effects of Serpinc1 silencing in non-human primates.

[0085] FIG. 27A is a graph showing the effects of a multi-dose administration (1.5 mg/kg qw, 3 mg/kg q2w) of a Serpinc1 siRNA on serum antithrombin levels in non-human primates. Data points represent group mean, error bars represent standard deviation (N=3). (qw=weekly; q2w=every other week).

[0086] FIG. 27B is a graph showing the effects of a multi-dose administration (0.5 mg/kg qw, 1 mg/kg q2w) of a Serpinc1 siRNA on serum antithrombin levels in non-human primates. Data points represent group mean, error bars represent standard deviation (N=3). (qw=weekly; q2w=every other week).

[0087] FIG. 28A is a graph showing the effect of Serpinc1 silencing on platelet accumulation following microvessel laser injury. The graph shows the median values from all inflicted injuries.

[0088] FIG. 28B is a graph showing the effect of Serpinc1 silencing on fibrin area following microvessel laser injury. The graph shows the median values from all inflicted injuries.

[0089] FIG. 29 is a graph showing the duration of silencing of Serpinc1 following administration of compound AD-57213 formulated in a lipid nucleic acid particle.

[0090] FIG. 30A shows the nucleotide sequence of Homo sapiens serpin peptidase inhibitor, clade C (antithrombin), member 1 (SERPINC1) (SEQ ID NO:1); FIG. 30B shows the nucleotide sequence of Macaca mulatta serpin peptidase inhibitor, clade C (antithrombin), member 1 (SERPINC1) (SEQ ID NO:2); FIG. 30C shows the nucleotide sequence of Mus musculus serine (or cysteine) peptidase inhibitor, clade C (antithrombin), member 1 (Serpinc1) (SEQ ID NO:3); FIG. 30D shows the nucleotide sequence of Rattus norvegicus serpin peptidase inhibitor, clade C (antithrombin), member 1 (Serpinc1) (SEQ ID NO:4); FIG. 30E shows the reverse complement of SEQ ID NO:1 (SEQ ID NO:5); FIG. 30F shows the reverse complement of SEQ ID NO:2 (SEQ ID NO:6); FIG. 30G shows the reverse complement of SEQ ID NO:3 (SEQ ID NO:7); FIG. 30H shows the reverse complement of SEQ ID NO:4 (SEQ ID NO:8); and FIG. 30I shows the amino acid seqeunce of an exemplary hydrophobic MTS-containing peptide, RFGF (SEQ ID NO: 9); the amino acid sequence of an exemplary RFGF analogue (SEQ ID NO: 10); the amino aicd sequence of the HIV Tat protein (SEQ ID NO: 11); the amino acid sequence of the Drosophila Antennapedia protein (SEQ ID NO: 12); and the amino acid sequence of an exemplary Peptide-based Cleavable Linking Group.

[0091] FIG. 31A is a graph depicting that antithrombin reduction increases thrombin generation in Factor IX-depleted human plasma in vitro.

[0092] FIG. 31B is a graph depicting that antithrombin reduction increases thrombin generation in Factor IX-depleted human plasma in vitro.

### DETAILED DESCRIPTION OF THE INVENTION

[0093] The present invention provides iRNA compositions which effect the RNA-induced silencing complex (RISC)-mediated cleavage of RNA transcripts of a Serpinc1 gene. The Serpinc1 gene may be within a cell, e.g., a cell within a subject, such as a human. The present invention also provides methods of using the iRNA compositions of the invention for inhibiting the expression of a Serpinc1 gene and/or for treating a subject having a disorder that would benefit from inhibiting or reducing the expression of a Serpinc1 gene, e.g., a bleeding disorder, such as hemophilia. The present invention further provides methods for preventing at least one symptom, e.g., bleeding, in a subject having a disorder that would benefit from inhibiting or reducing the expression of a Serpinc1 gene, e.g., a bleeding disorder, such as hemophilia.

[0094] The iRNAs of the invention include an RNA strand (the antisense strand) having a region which is about 30 nucleotides or less in length, e.g., 15-30, 15-29, 15-28, 15-27, 15-26, 15-25, 15-24, 15-23, 15-22, 15-21, 15-20, 15-19, 15-18, 15-17, 18-30, 18-29, 18-28, 18-27, 18-26, 18-25, 18-24, 18-23, 18-22, 18-21, 18-20, 19-30, 19-29, 19-28, 19-27, 19-26, 19-25, 19-24, 19-23, 19-22, 19-21, 19-20, 20-30, 20-29, 20-28, 20-27, 20-26, 20-25, 20-24,20-23, 20-22, 20-21, 21-30, 21-29, 21-28, 21-27, 21-26, 21-25, 21-24, 21-23, or 21-22 nucleotides in length, which region is substantially complementary to at least part of an mRNA transcript of a Serpinc1 gene. The use of these iRNAs enables the targeted degradation of mRNAs of a Serpinc1 gene in mammals. Very low dosages of Serpinc1 iRNAs, in particular, can specifically and efficiently mediate RNA interference (RNAi), resulting in significant inhibition of expression of a Serpinc1 gene. The present inventors have demonstrated that iRNAs targeting Serpinc1 can mediate RNAi in vitro and in vivo, resulting in significant inhibition of expression of a Serpinc1 gene. Thus, methods and compositions including these iRNAs are useful for treating a subject who would benefit by a reduction in the levels and/or activity of a Serpinc1 protein, such as a subject having a bleeding disorder, e.g., hemophilia.

[0095] The following detailed description discloses how to make and use compositions containing iRNAs to inhibit the expression of a Serpinc1 gene, as well as compositions, uses, and methods for treating subjects having diseases and disorders that would benefit from inhibition and/or reduction of the expression of this gene.

### I. Definitions

[0096] In order that the present invention may be more readily understood, certain terms are first defined. In addition, it should be noted that whenever a value or range of values of a parameter are recited, it is intended that values and ranges intermediate to the recited values are also intended to be part of this invention.

[0097] The articles “a” and “an” are used herein to refer to one or to more than one (i.e., to at least one) of the grammatical object of the article. By way of example, “an element” means one element or more than one element, e.g., a plurality of elements.

[0098] The term “including” is used herein to mean, and is used interchangeably with, the phrase “including but not limited to.”

[0099] The term “or” is used herein to mean, and is used interchangeably with, the term “and/or,” unless context clearly indicates otherwise.

[0100] As used herein, “Serpinc1” refers to a particular polypeptide expressed in a cell. Serpinc1 is also known as serpin peptidase inhibitor, clade C (antithrombin), member 1; antithrombin III; AT3; antithrombin; and heparin cofactor 1. The sequence of a human Serpinc1 mRNA transcript can be found at, for example, GenBank Accession No. GI:254588059 (NM_000488; SEQ ID NO:1). The sequence of rhesus Serpinc1 mRNA can be found at, for example, GenBank Accession No. GI:157167169 (NM_001104583; SEQ ID NO:2). The sequence of mouse Serpinc1 mRNA can be found at, for example, GenBank Accession No. GI:237874216 (NM_080844; SEQ ID NO:3). The sequence of rat Serpinc1 mRNA can be found at, for example, GenBank Accession No. GI:58865629 (NM_001012027; SEQ ID NO:4).

[0101] The term “Serpinc1,” as used herein also refers to a particular polypeptide expressed in a cell by naturally occurring DNA sequence variations of the Serpinc1 gene, such as a single nucleotide polymorphism in the Serpinc1 gene. Numerous SNPs within the Serpinc1 gene have been identified and may be found at, for example, NCBI dbSNP (see, e.g., ncbi.nlm.nih.gov/snp). Non-limiting examples of SNPs within the Serpinc1 gene may be found at, NCBI dbSNP Accession Nos. rs677; rs5877; rs5878; rs5879; rs941988; rs941989; rs1799876; rs19637711; rs2008946; and rs2227586.

[0102] As used herein, “target sequence” refers to a contiguous portion of the nucleotide sequence of an mRNA molecule formed during the transcription of a Serpinc1 gene, including mRNA that is a product of RNA processing of a primary transcription product. In one embodiment, the target portion of the sequence will be at least long enough to serve as a substrate for iRNA-directed cleavage at or near that portion of the nucleotide sequence of an mRNA molecule formed during the transcription of a Serpinc1 gene.

[0103] The target sequence may be from about 9-36 nucleotides in length, e.g., about 15-30 nucleotides in length. For example, the target sequence can be from about 15-30 nucleotides, 15-29, 15-28, 15-27, 15-26, 15-25, 15-24, 15-23, 15-22, 15-21, 15-20, 15-19, 15-18, 15-17, 18-30, 18-29, 18-28, 18-27, 18-26, 18-25, 18-24, 18-23, 18-22, 18-21, 18-20, 19-30, 19-29, 19-28, 19-27, 19-26, 19-25, 19-24, 19-23, 19-22, 19-21, 19-20, 20-30, 20-29, 20-28, 20-27, 20-26, 20-25, 20-24,20-23, 20-22, 20-21, 21-30, 21-29, 21-28, 21-27, 21-26, 21-25, 21-24, 21-23, or 21-22 nucleotides in length. Ranges and lengths intermediate to the above recited ranges and lengths are also contemplated to be part of the invention.

[0104] As used herein, the term “strand comprising a sequence” refers to an oligonucleotide comprising a chain of nucleotides that is described by the sequence referred to using the standard nucleotide nomenclature.

[0105] “G,” “C,” “A,” “T,” and “U” each generally stand for a nucleotide that contains guanine, cytosine, adenine, thymidine and uracil as a base, respectively. However, it will be understood that the term “ribonucleotide” or “nucleotide” can also refer to a modified nucleotide, as further detailed below, or a surrogate replacement moiety (see, e.g., Table 2). The skilled person is well aware that guanine, cytosine, adenine, and uracil can be replaced by other moieties without substantially altering the base pairing properties of an oligonucleotide comprising a nucleotide bearing such replacement moiety. For example, without limitation, a nucleotide comprising inosine as its base can base pair with nucleotides containing adenine, cytosine, or uracil. Hence, nucleotides containing uracil, guanine, or adenine can be replaced in the nucleotide sequences of dsRNA featured in the invention by a nucleotide containing, for example, inosine. In another example, adenine and cytosine anywhere in the oligonucleotide can be replaced with guanine and uracil, respectively to form G-U Wobble base pairing with the target mRNA. Sequences containing such replacement moieties are suitable for the compositions and methods featured in the invention.

[0106] The terms “iRNA,” “RNAi agent,” “iRNA agent,” “RNA interference agent” as used interchangeably herein, refer to an agent that contains RNA as that term is defined herein, and which mediates the targeted cleavage of an RNA transcript via an RNA-induced silencing complex (RISC) pathway. iRNA directs the sequence-specific degradation of mRNA through a process known as RNA interference (RNAi). The iRNA modulates, e.g., inhibits, the expression of Serpinc1 in a cell, e.g., a cell within a subject, such as a mammalian subject.

[0107] In one embodiment, an RNAi agent of the invention includes a single stranded RNA that interacts with a target RNA sequence, e.g., a Serpinc1 target mRNA sequence, to direct the cleavage of the target RNA. Without wishing to be bound by theory it is believed that long double stranded RNA introduced into cells is broken down into siRNA by a Type III endonuclease known as Dicer (Sharp et al., (2001) Genes Dev. 15:485). Dicer, a ribonuclease-III-like enzyme, processes the dsRNA into 19-23 base pair short interfering RNAs with characteristic two base 3′ overhangs (Bernstein, et al., (2001) Nature 409:363). The siRNAs are then incorporated into an RNA-induced silencing complex (RISC) where one or more helicases unwind the siRNA duplex, enabling the complementary antisense strand to guide target recognition (Nykanen, et al., (2001) Cell 107:309). Upon binding to the appropriate target mRNA, one or more endonucleases within the RISC cleave the target to induce silencing (Elbashir, et al., (2001) Genes Dev. 15:188). Thus, in one aspect the invention relates to a single stranded RNA (siRNA) generated within a cell and which promotes the formation of a RISC complex to effect silencing of the target gene, i.e., a Serpinc1 gene. Accordingly, the term “siRNA” is also used herein to refer to an RNAi as described above.

[0108] In another embodiment, the RNAi agent may be a single-stranded siRNA that is introduced into a cell or organism to inhibit a target mRNA. The single-stranded siRNAs are generally 15-30 nucleotides and are chemically modified. The design and testing of single-stranded siRNAs are described in U.S. Pat. No. 8,101,348 and in Lima et al., (2012) Cell 150: 883-894, the entire contents of each of which are hereby incorporated herein by reference. Any of the antisense nucleotide sequences described herein may be used as a single-stranded siRNA as described herein or as chemically modified by the methods described in Lima et al., (2012) Cell 150:883-894.

[0109] In another aspect, the agent is a single-stranded antisense RNA molecule that inhibits a target via an antisense inhibition mechanism. The single-stranded antisense RNA molecule is complementary to a sequence within the target mRNA. Antisense RNA can inhibit translation in a stoichiometric manner by base pairing to the mRNA and physically obstructing the translation machinery, see Dias, et al., (2002) Mol Cancer Ther. 1:347-355. Alternatively, the single-stranded antisense RNA molecule inhibits a target mRNA by hybridizing to the target and cleaving the target through an RNaseH cleavage event. The single-stranded antisense RNA molecule may be about 15 to about 30 nucleotides in length and have a sequence that is complementary to a target sequence. For example, the single-stranded antisense RNA molecule may comprise a sequence that is at least about 15, 16, 17, 18, 19, 20, or more contiguous nucleotides from any one of the antisense sequences in any one of Tables 3, 4, 8, 11, 12, 14, 15, 20, and 21.

[0110] In another embodiment, an “iRNA” for use in the compositions, uses, and methods of the invention is a double-stranded RNA and is referred to herein as a “double stranded RNAi agent,” “double-stranded RNA (dsRNA) molecule,” “dsRNA agent,” or “dsRNA.” The term “dsRNA” refers to a complex of ribonucleic acid molecules, having a duplex structure comprising two anti-parallel and substantially complementary nucleic acid strands, referred to as having “sense” and “antisense” orientations with respect to a target RNA, i.e., a Serpinc1 gene. In some embodiments of the invention, a double-stranded RNA (dsRNA) triggers the degradation of a target RNA, e.g., an mRNA, through a post-transcriptional gene-silencing mechanism referred to herein as RNA interference or RNAi.

[0111] The duplex region may be of any length that permits specific degradation of a desired target RNA through a RISC pathway, and may range from about 9 to 36 base pairs in length, e.g., about 15-30 base pairs in length, for example, about 9, 10, 11, 12, 13, 14, 15, 16, 17, 18, 19, 20, and 21, 22, 23, 24, 25, 26, 27, 28, 29, 30, 31, 32, 33, 34, 35, or 36 base pairs in length, such as about 15-30, 15-29, 15-28, 15-27, 15-26, 15-25, 15-24, 15-23, 15-22, 15-21, 15-20, 15-19, 15-18, 15-17, 18-30, 18-29, 18-28, 18-27, 18-26, 18-25, 18-24, 18-23, 18-22, 18-21, 18-20, 19-30, 19-29, 19-28, 19-27, 19-26, 19-25, 19-24, 19-23, 19-22, 19-21, 19-20, 20-30, 20-29, 20-28, 20-27, 20-26, 20-25, 20-24,20-23, 20-22, 20-21, 21-30, 21-29, 21-28, 21-27, 21-26, 21-25, 21-24, 21-23, or 21-22 base pairs in length. Ranges and lengths intermediate to the above recited ranges and lengths are also contemplated to be part of the invention.

[0112] The two strands forming the duplex structure may be different portions of one larger RNA molecule, or they may be separate RNA molecules. Where the two strands are part of one larger molecule, and therefore are connected by an uninterrupted chain of nucleotides between the 3′-end of one strand and the 5′-end of the respective other strand forming the duplex structure, the connecting RNA chain is referred to as a “hairpin loop.” A hairpin loop can comprise at least one unpaired nucleotide. In some embodiments, the hairpin loop can comprise at least 2, at least 3, at least 4, at least 5, at least 6, at least 7, at least 8, at least 9, at least 10, at least 20, at least 23 or more unpaired nucleotides.

[0113] Where the two substantially complementary strands of a dsRNA are comprised by separate RNA molecules, those molecules need not, but can be covalently connected. Where the two strands are connected covalently by means other than an uninterrupted chain of nucleotides between the 3′-end of one strand and the 5′-end of the respective other strand forming the duplex structure, the connecting structure is referred to as a “linker.” The RNA strands may have the same or a different number of nucleotides. The maximum number of base pairs is the number of nucleotides in the shortest strand of the dsRNA minus any overhangs that are present in the duplex. In addition to the duplex structure, an RNAi may comprise one or more nucleotide overhangs.

[0114] As used herein, the term “nucleotide overhang” refers to at least one unpaired nucleotide that protrudes from the duplex structure of an iRNA, e.g., a dsRNA. For example, when a 3′-end of one strand of a dsRNA extends beyond the 5′-end of the other strand, or vice versa, there is a nucleotide overhang. A dsRNA can comprise an overhang of at least one nucleotide; alternatively, the overhang can comprise at least two nucleotides, at least three nucleotides, at least four nucleotides, at least five nucleotides or more. A nucleotide overhang can comprise or consist of a nucleotide/nucleoside analog, including a deoxynucleotide/nucleoside. The overhang(s) can be on the sense strand, the antisense strand or any combination thereof. Furthermore, the nucleotide(s) of an overhang can be present on the 5′-end, 3′-end or both ends of either an antisense or sense strand of a dsRNA.

[0115] In one embodiment, the antisense strand of a dsRNA has a 1-10 nucleotide, e.g., a 1, 2, 3, 4, 5, 6, 7, 8, 9, or 10 nucleotides, overhang at the 3′-end and/or the 5′-end. In one embodiment, the sense strand of a dsRNA has a 1-10 nucleotide, e.g., a 1, 2, 3, 4, 5, 6, 7, 8, 9, or 10 nucleotides, overhang at the 3′-end and/or the 5′-end. In another embodiment, one or more of the nucleotides in the overhang is replaced with a nucleoside thiophosphate.

[0116] The terms “blunt” or “blunt ended” as used herein in reference to a dsRNA mean that there are no unpaired nucleotides or nucleotide analogs at a given terminal end of a dsRNA, i.e., no nucleotide overhang. One or both ends of a dsRNA can be blunt. Where both ends of a dsRNA are blunt, the dsRNA is said to be blunt ended. To be clear, a “blunt ended” dsRNA is a dsRNA that is blunt at both ends, i.e., no nucleotide overhang at either end of the molecule. Most often such a molecule will be double-stranded over its entire length.

[0117] The term “antisense strand” or “guide strand” refers to the strand of an iRNA, e.g., a dsRNA, which includes a region that is substantially complementary to a target sequence, e.g., a Serpinc1 mRNA. As used herein, the term “region of complementarity” refers to the region on the antisense strand that is substantially complementary to a sequence, for example a target sequence, e.g., a Serpinc1 nucleotide sequence, as defined herein. Where the region of complementarity is not fully complementary to the target sequence, the mismatches can be in the internal or terminal regions of the molecule. Generally, the most tolerated mismatches are in the terminal regions, e.g., within 5, 4, 3, or 2 nucleotides of the 5′- and/or 3′-terminus of the iRNA.

[0118] The term “sense strand,” or “passenger strand” as used herein, refers to the strand of an iRNA that includes a region that is substantially complementary to a region of the antisense strand as that term is defined herein.

[0119] As used herein, and unless otherwise indicated, the term “complementary,” when used to describe a first nucleotide sequence in relation to a second nucleotide sequence, refers to the ability of an oligonucleotide or polynucleotide comprising the first nucleotide sequence to hybridize and form a duplex structure under certain conditions with an oligonucleotide or polynucleotide comprising the second nucleotide sequence, as will be understood by the skilled person. Such conditions can, for example, be stringent conditions, where stringent conditions can include: 400 mM NaCl, 40 mM PIPES pH 6.4, 1 mM EDTA, 50° C. or 70° C. for 12-16 hours followed by washing (see, e.g., “Molecular Cloning: A Laboratory Manual, Sambrook, et al., (1989) Cold Spring Harbor Laboratory Press). Other conditions, such as physiologically relevant conditions as can be encountered inside an organism, can apply. The skilled person will be able to determine the set of conditions most appropriate for a test of complementarity of two sequences in accordance with the ultimate application of the hybridized nucleotides.

[0120] Complementary sequences within an iRNA, e.g., within a dsRNA as described herein, include base-pairing of the oligonucleotide or polynucleotide comprising a first nucleotide sequence to an oligonucleotide or polynucleotide comprising a second nucleotide sequence over the entire length of one or both nucleotide sequences. Such sequences can be referred to as “fully complementary” with respect to each other herein. However, where a first sequence is referred to as “substantially complementary” with respect to a second sequence herein, the two sequences can be fully complementary, or they can form one or more, but generally not more than 5, 4, 3 or 2 mismatched base pairs upon hybridization for a duplex up to 30 base pairs, while retaining the ability to hybridize under the conditions most relevant to their ultimate application, e.g., inhibition of gene expression via a RISC pathway. However, where two oligonucleotides are designed to form, upon hybridization, one or more single stranded overhangs, such overhangs shall not be regarded as mismatches with regard to the determination of complementarity. For example, a dsRNA comprising one oligonucleotide 21 nucleotides in length and another oligonucleotide 23 nucleotides in length, wherein the longer oligonucleotide comprises a sequence of 21 nucleotides that is fully complementary to the shorter oligonucleotide, can yet be referred to as “fully complementary” for the purposes described herein.

[0121] “Complementary” sequences, as used herein, can also include, or be formed entirely from, non-Watson-Crick base pairs and/or base pairs formed from non-natural and modified nucleotides, in so far as the above requirements with respect to their ability to hybridize are fulfilled. Such non-Watson-Crick base pairs include, but are not limited to, G:U Wobble or Hoogstein base pairing.

[0122] The terms “complementary,” “fully complementary” and “substantially complementary” herein can be used with respect to the base matching between the sense strand and the antisense strand of a dsRNA, or between the antisense strand of an iRNA agent and a target sequence, as will be understood from the context of their use.

[0123] As used herein, a polynucleotide that is “substantially complementary to at least part of” a messenger RNA (mRNA) refers to a polynucleotide that is substantially complementary to a contiguous portion of the mRNA of interest (e.g., an mRNA encoding Serpinc1). For example, a polynucleotide is complementary to at least a part of a Serpinc1 mRNA if the sequence is substantially complementary to a non-interrupted portion of an mRNA encoding Serpinc1.

[0124] In general, the majority of nucleotides of each strand are ribonucleotides, but as described in detail herein, each or both strands can also include one or more non-ribonucleotides, e.g., a deoxyribonucleotide and/or a modified nucleotide. In addition, an “iRNA” may include ribonucleotides with chemical modifications. Such modifications may include all types of modifications disclosed herein or known in the art. Any such modifications, as used in an iRNA molecule, are encompassed by “iRNA” for the purposes of this specification and claims.

[0125] The term “inhibiting,” as used herein, is used interchangeably with “reducing,” “silencing,” “downregulating,” “suppressing” and other similar terms, and includes any level of inhibition.

[0126] The phrase “inhibiting expression of a Serpinc1,” as used herein, includes inhibition of expression of any Serpinc1 gene (such as, e.g., a mouse Serpinc1 gene, a rat Serpinc1 gene, a monkey Serpinc1 gene, or a human Serpinc1 gene) as well as variants or mutants of a Serpinc1 gene that encodes a Serpinc1 protein.

[0127] “Inhibiting expression of a Serpinc1 gene” includes any level of inhibition of a Serpinc1 gene, e.g., at least partial suppression of the expression of a Serpinc1 gene, such as an inhibition by at least about 5%, at least about 10%, at least about 15%, at least about 20%, at least about 25%, at least about 30%, at least about 35%, at least about 40%, at least about 45%, at least about 50%, at least about 55%, at least about 60%, at least about 65%, at least about 70%, at least about 75%, at least about 80%, at least about 85%, at least about 90%, at least about 91%, at least about 92%, at least about 93%, at least about 94%, at least about 95%, at least about 96%, at least about 97%, at least about 98%, or at least about 99%.

[0128] The expression of a Serpinc1 gene may be assessed based on the level of any variable associated with Serpinc1 gene expression, e.g., Serpinc1 mRNA level, Serpinc1 protein level, or, for example, thrombin:antithrombin complex levels as a measure of thrombin generation portential, bleeding time, prothrombin time (PT), platelet count, and/or activated partial thromboplastin time (aPTT). Inhibition may be assessed by a decrease in an absolute or relative level of one or more of these variables compared with a control level. The control level may be any type of control level that is utilized in the art, e.g., a pre-dose baseline level, or a level determined from a similar subject, cell, or sample that is untreated or treated with a control (such as, e.g., buffer only control or inactive agent control).

[0129] In one embodiment, at least partial suppression of the expression of a Serpinc1 gene, is assessed by a reduction of the amount of Serpinc1 mRNA which can be isolated from or detected in a first cell or group of cells in which a Serpinc1 gene is transcribed and which has or have been treated such that the expression of a Serpinc1 gene is inhibited, as compared to a second cell or group of cells substantially identical to the first cell or group of cells but which has or have not been so treated (control cells). The degree of inhibition may be expressed in terms of

$$\frac{( mRNA in control cells ) - ( mRNA in treated cells )}{( mRNA in control cells )} \cdot 100 \%$$

[0130] The phrase “contacting a cell with an RNAi agent,” such as a dsRNA, as used herein, includes contacting a cell by any possible means. Contacting a cell with an RNAi agent includes contacting a cell in vitro with the iRNA or contacting a cell in vivo with the iRNA. The contacting may be done directly or indirectly. Thus, for example, the RNAi agent may be put into physical contact with the cell by the individual performing the method, or alternatively, the RNAi agent may be put into a situation that will permit or cause it to subsequently come into contact with the cell.

[0131] Contacting a cell in vitro may be done, for example, by incubating the cell with the RNAi agent. Contacting a cell in vivo may be done, for example, by injecting the RNAi agent into or near the tissue where the cell is located, or by injecting the RNAi agent into another area, e.g., the bloodstream or the subcutaneous space, such that the agent will subsequently reach the tissue where the cell to be contacted is located. For example, the RNAi agent may contain and/or be coupled to a ligand, e.g., GalNAc3, that directs the RNAi agent to a site of interest, e.g., the liver. Combinations of in vitro and in vivo methods of contacting are also possible. For example, a cell may also be contacted in vitro with an RNAi agent and subsequently transplanted into a subject.

[0132] In one embodiment, contacting a cell with an iRNA includes “introducing” or “delivering the iRNA into the cell” by facilitating or effecting uptake or absorption into the cell. Absorption or uptake of an iRNA can occur through unaided diffusive or active cellular processes, or by auxiliary agents or devices. Introducing an iRNA into a cell may be in vitro and/or in vivo. For example, for in vivo introduction, iRNA can be injected into a tissue site or administered systemically. In vivo delivery can also be done by a beta-glucan delivery system, such as those described in U.S. Pat. Nos. 5,032,401 and 5,607,677, and U.S. Publication No. 2005/0281781, the entire contents of which are hereby incorporated herein by reference. In vitro introduction into a cell includes methods known in the art such as electroporation and lipofection. Further approaches are described herein below and/or are known in the art.

[0133] The term “lipid nanoparticle” or “LNP” is a vesicle comprising a lipid layer encapsulating a pharmaceutically active molecule, such as a nucleic acid molecule, e.g., an iRNA or a plasmid from which an iRNA is transcribed. LNPs are described in, for example, U.S. Pat. Nos. 6,858,225, 6,815,432, 8,158,601, and 8,058,069, the entire contents of which are hereby incorporated herein by reference.

[0134] The term “SNALP” refers to a stable nucleic acid-lipid particle. A SNALP is a vesicle of lipids coating a reduced aqueous interior comprising a nucleic acid such as an iRNA or a plasmid from which an iRNA is transcribed. SNALPs are described, e.g., in U.S. Patent Application Publication Nos. 20060240093, 20070135372, and in International Application No. WO 2009082817, the entire contents of which are hereby incorporated herein by reference. Examples of “SNALP” formulations are described below.

[0135] As used herein, a “subject” is an animal, such as a mammal, including a primate (such as a human, a non-human primate, e.g., a monkey, and a chimpanzee), a non-primate (such as a cow, a pig, a camel, a llama, a horse, a goat, a rabbit, a sheep, a hamster, a guinea pig, a cat, a dog, a rat, a mouse, a horse, and a whale), or a bird (e.g., a duck or a goose). In an embodiment, the subject is a human, such as a human being treated or assessed for a disease, disorder or condition that would benefit from reduction in Serpinc1 expression; a human at risk for a disease, disorder or condition that would benefit from reduction in Serpinc1 expression; a human having a disease, disorder or condition that would benefit from reduction in Serpinc1 expression; and/or human being treated for a disease, disorder or condition that would benefit from reduction in Serpinc1 expression as described herein. As used herein, the terms “treating” or “treatment” refer to a beneficial or desired result including, but not limited to, alleviation or amelioration of one or more symptoms, diminishing the extent of bleeding, stabilized (i.e., not worsening) state of bleeding, amelioration or palliation of the bleeding, whether detectable or undetectable. “Treatment” can also mean prolonging survival as compared to expected survival in the absence of treatment.

[0136] By “lower” in the context of a disease marker or symptom is meant a statistically significant decrease in such level. The decrease can be, for example, at least 10%, at least 20%, at least 30%, at least 40% or more, and is preferably down to a level accepted as within the range of normal for an individual without such disorder.

[0137] As used herein, “prevention” or “preventing,” when used in reference to a disease, disorder or condition thereof, that would benefit from a reduction in expression of a Sertpincl gene, refers to a reduction in the likelihood that a subject will develop a symptom associated with a such a disease, disorder, or condition, e.g., a symptom such as a bleed. The likelihood of developing a bleed is reduced, for example, when an individual having one or more risk factors for a bleed either fails to develop a bleed or develops a bleed with less severity relative to a population having the same risk factors and not receiving treatment as described herein. The failure to develop a disease, disorder or condition, or the reduction in the development of a symptom associated with such a disease, disorder or condition (e.g., by at least about 10% on a clinically accepted scale for that disease or disorder), or the exhibition of delayed symptoms delayed (e.g., by days, weeks, months or years) is considered effective prevention.

[0138] As used herein, the term “bleeding disorder” is a disease or disorder that results in poor blood clotting and/or excessive bleeding. A bleeding disorder may be an inherited disorder, such as a hemophilia or von Willebrand's disease, or an acquired disorder, associated with, for example, disseminated intravascular coagulation, pregnancy-associated eclampsia, vitamin K deficiency, an autoimmune disorder, inflammatory bowel disease, ulcerative colitis, a dermatologic disorder (e.g., psoriasis, pemphigus), a respiratory disease (e.g., asthma, chronic obstructive pulmonary disease), an allergic drug reaction, e.g., the result of medications, such as aspirin, heparin, and warfarin, diabetes, acute hepatitis B infection, acute hepatitis C infection, a malignancy or solid tumor (e.g., prostate, lung, colon, pancreas, stomach, bile duct, head and neck, cervix, breast, melanoma, kidney, and/or a hematologic malignancy). In one embodiment, an inherited bleeding disorder is a hemophilia, e.g., hemophilia A, B, or C. In one embodment, a subject having an inherited bleeding disorder, e.g., a hemophilia, has developed inhibitors, e.g., alloantibody inhibitors, to replacement coagulation therapies and is referred to herein as an “inhibitor subject.” In one embodiment, the inhibitor subject has hemophilia A. In another embodiment, the inhibitor subject has hemophilia B. In yet another embodiment, the inhibitor subject has hemophilia C.

[0139] “Therapeutically effective amount,” as used herein, is intended to include the amount of an RNAi agent that, when administered to a subject having a bleeding disorder and bleeding, is sufficient to effect treatment of the disease (e.g., by diminishing, ameliorating or maintaining the existing disease or one or more symptoms of disease). The “therapeutically effective amount” may vary depending on the RNAi agent, how the agent is administered, the disease and its severity and the history, age, weight, family history, genetic makeup, the types of preceding or concomitant treatments, if any, and other individual characteristics of the subject to be treated.

[0140] “Prophylactically effective amount,” as used herein, is intended to include the amount of an iRNA that, when administered to a subject having a bleeding disorder but not bleeding, e.g., a subject having a bleeding disorder and scheduled for surgery, is sufficient to prevent or ameliorate the disease or one or more symptoms of the disease. Ameliorating the disease includes slowing the course of the disease or reducing the severity of later-developing disease. The “prophylactically effective amount” may vary depending on the iRNA, how the agent is administered, the degree of risk of disease, and the history, age, weight, family history, genetic makeup, the types of preceding or concomitant treatments, if any, and other individual characteristics of the patient to be treated.

[0141] A “therapeutically effective amount” or “prophylactically effective amount” also includes an amount of an RNAi agent that produces some desired local or systemic effect at a reasonable benefit/risk ratio applicable to any treatment. iRNA employed in the methods of the present invention may be administered in a sufficient amount to produce a reasonable benefit/risk ratio applicable to such treatment.

[0142] The phrase “pharmaceutically acceptable” is employed herein to refer to those compounds, materials, compositions, and/or dosage forms which are, within the scope of sound medical judgment, suitable for use in contact with the tissues of human subjects and animal subjects without excessive toxicity, irritation, allergic response, or other problem or complication, commensurate with a reasonable benefit/risk ratio.

[0143] The phrase “pharmaceutically-acceptable carrier” as used herein means a pharmaceutically-acceptable material, composition or vehicle, such as a liquid or solid filler, diluent, excipient, manufacturing aid (e.g., lubricant, talc magnesium, calcium or zinc stearate, or steric acid), or solvent encapsulating material, involved in carrying or transporting the subject compound from one organ, or portion of the body, to another organ, or portion of the body. Each carrier must be “acceptable” in the sense of being compatible with the other ingredients of the formulation and not injurious to the subject being treated. Some examples of materials which can serve as pharmaceutically-acceptable carriers include: (1) sugars, such as lactose, glucose and sucrose; (2) starches, such as corn starch and potato starch; (3) cellulose, and its derivatives, such as sodium carboxymethyl cellulose, ethyl cellulose and cellulose acetate; (4) powdered tragacanth; (5) malt; (6) gelatin; (7) lubricating agents, such as magnesium state, sodium lauryl sulfate and talc; (8) excipients, such as cocoa butter and suppository waxes; (9) oils, such as peanut oil, cottonseed oil, safflower oil, sesame oil, olive oil, corn oil and soybean oil; (10) glycols, such as propylene glycol; (11) polyols, such as glycerin, sorbitol, mannitol and polyethylene glycol; (12) esters, such as ethyl oleate and ethyl laureate; (13) agar; (14) buffering agents, such as magnesium hydroxide and aluminum hydroxide; (15) alginic acid; (16) pyrogen-free water; (17) isotonic saline; (18) Ringer's solution; (19) ethyl alcohol; (20) pH buffered solutions; (21) polyesters, polycarbonates and/or polyanhydrides; (22) bulking agents, such as polypeptides and amino acids (23) serum component, such as serum albumin, HDL and LDL; and (22) other non-toxic compatible substances employed in pharmaceutical formulations.

[0144] The term “sample,” as used herein, includes a collection of similar fluids, cells, or tissues isolated from a subject, as well as fluids, cells, or tissues present within a subject. Examples of biological fluids include blood, serum and serosal fluids, plasma, cerebrospinal fluid, ocular fluids, lymph, urine, saliva, and the like. Tissue samples may include samples from tissues, organs or localized regions. For example, samples may be derived from particular organs, parts of organs, or fluids or cells within those organs. In certain embodiments, samples may be derived from the liver (e.g., whole liver or certain segments of liver or certain types of cells in the liver, such as, e.g., hepatocytes). In some embodiments, a “sample derived from a subject” refers to blood or plasma drawn from the subject.

### II. iRNAs of the Invention

[0145] Described herein are iRNAs which inhibit the expression of a Serpinc1 gene. In one embodiment, the iRNA agent includes double-stranded ribonucleic acid (dsRNA) molecules for inhibiting the expression of a Serpinc1 gene in a cell, such as a cell within a subject, e.g., a mammal, such as a human having a bleeding disorder, e.g., an inherited bleeding disorder. The dsRNA includes an antisense strand having a region of complementarity which is complementary to at least a part of an mRNA formed in the expression of a Serpinc1 gene. The region of complementarity is about 30 nucleotides or less in length (e.g., about 30, 29, 28, 27, 26, 25, 24, 23, 22, 21, 20, 19, or 18 nucleotides or less in length). Upon contact with a cell expressing the Serpinc1 gene, the iRNA inhibits the expression of the Serpinc1 gene (e.g., a human, a primate, a non-primate, or a bird Sertpincl gene) by at least about 10% as assayed by, for example, a PCR or branched DNA (bDNA)-based method, or by a protein-based method, such as by immunofluorescence analysis, using, for example, Western Blotting or flowcytometric techniques.

[0146] A dsRNA includes two RNA strands that are complementary and hybridize to form a duplex structure under conditions in which the dsRNA will be used. One strand of a dsRNA (the antisense strand) includes a region of complementarity that is substantially complementary, and generally fully complementary, to a target sequence. The target sequence can be derived from the sequence of an mRNA formed during the expression of a Serpinc1 gene. The other strand (the sense strand) includes a region that is complementary to the antisense strand, such that the two strands hybridize and form a duplex structure when combined under suitable conditions. As described elsewhere herein and as known in the art, the complementary sequences of a dsRNA can also be contained as self-complementary regions of a single nucleic acid molecule, as opposed to being on separate oligonucleotides.

[0147] Generally, the duplex structure is between 15 and 30 base pairs in length, e.g., between, 15-29, 15-28, 15-27, 15-26, 15-25, 15-24, 15-23, 15-22, 15-21, 15-20, 15-19, 15-18, 15-17, 18-30, 18-29, 18-28, 18-27, 18-26, 18-25, 18-24, 18-23, 18-22, 18-21, 18-20, 19-30, 19-29, 19-28, 19-27, 19-26, 19-25, 19-24, 19-23, 19-22, 19-21, 19-20, 20-30, 20-29, 20-28, 20-27, 20-26, 20-25, 20-24,20-23, 20-22, 20-21, 21-30, 21-29, 21-28, 21-27, 21-26, 21-25, 21-24, 21-23, or 21-22 base pairs in length. Ranges and lengths intermediate to the above recited ranges and lengths are also contemplated to be part of the invention.

[0148] Similarly, the region of complementarity to the target sequence is between 15 and 30 nucleotides in length, e.g., between 15-29, 15-28, 15-27, 15-26, 15-25, 15-24, 15-23, 15-22, 15-21, 15-20, 15-19, 15-18, 15-17, 18-30, 18-29, 18-28, 18-27, 18-26, 18-25, 18-24, 18-23, 18-22, 18-21, 18-20, 19-30, 19-29, 19-28, 19-27, 19-26, 19-25, 19-24, 19-23, 19-22, 19-21, 19-20, 20-30, 20-29, 20-28, 20-27, 20-26, 20-25, 20-24,20-23, 20-22, 20-21, 21-30, 21-29, 21-28, 21-27, 21-26, 21-25, 21-24, 21-23, or 21-22 nucleotides in length. Ranges and lengths intermediate to the above recited ranges and lengths are also contemplated to be part of the invention.

[0149] In some embodiments, the dsRNA is between about 15 and about 20 nucleotides in length, or between about 25 and about 30 nucleotides in length. In general, the dsRNA is long enough to serve as a substrate for the Dicer enzyme. For example, it is well-known in the art that dsRNAs longer than about 21-23 nucleotides in length may serve as substrates for Dicer. As the ordinarily skilled person will also recognize, the region of an RNA targeted for cleavage will most often be part of a larger RNA molecule, often an mRNA molecule. Where relevant, a “part” of an mRNA target is a contiguous sequence of an mRNA target of sufficient length to allow it to be a substrate for RNAi-directed cleavage (i.e., cleavage through a RISC pathway).

[0150] One of skill in the art will also recognize that the duplex region is a primary functional portion of a dsRNA, e.g., a duplex region of about 9 to 36 base pairs, e.g., about 10-36, 11-36, 12-36, 13-36, 14-36, 15-36, 9-35, 10-35, 11-35, 12-35, 13-35, 14-35, 15-35, 9-34, 10-34, 11-34, 12-34, 13-34, 14-34, 15-34, 9-33, 10-33, 11-33, 12-33, 13-33, 14-33, 15-33, 9-32, 10-32, 11-32, 12-32, 13-32, 14-32, 15-32, 9-31, 10-31, 11-31, 12-31, 13-32, 14-31, 15-31, 15-30, 15-29, 15-28, 15-27, 15-26, 15-25, 15-24, 15-23, 15-22, 15-21, 15-20, 15-19, 15-18, 15-17, 18-30, 18-29, 18-28, 18-27, 18-26, 18-25, 18-24, 18-23, 18-22, 18-21, 18-20, 19-30, 19-29, 19-28, 19-27, 19-26, 19-25, 19-24, 19-23, 19-22, 19-21, 19-20, 20-30, 20-29, 20-28, 20-27, 20-26, 20-25, 20-24,20-23, 20-22, 20-21, 21-30, 21-29, 21-28, 21-27, 21-26, 21-25, 21-24, 21-23, or 21-22 base pairs. Thus, in one embodiment, to the extent that it becomes processed to a functional duplex, of e.g., 15-30 base pairs, that targets a desired RNA for cleavage, an RNA molecule or complex of RNA molecules having a duplex region greater than 30 base pairs is a dsRNA. Thus, an ordinarily skilled artisan will recognize that in one embodiment, a miRNA is a dsRNA. In another embodiment, a dsRNA is not a naturally occurring miRNA. In another embodiment, an iRNA agent useful to target Serpinc1 expression is not generated in the target cell by cleavage of a larger dsRNA.

[0151] A dsRNA as described herein can further include one or more single-stranded nucleotide overhangs e.g., 1, 2, 3, or 4 nucleotides. dsRNAs having at least one nucleotide overhang can have unexpectedly superior inhibitory properties relative to their blunt-ended counterparts. A nucleotide overhang can comprise or consist of a nucleotide/nucleoside analog, including a deoxynucleotide/nucleoside. The overhang(s) can be on the sense strand, the antisense strand or any combination thereof. Furthermore, the nucleotide(s) of an overhang can be present on the 5′-end, 3′-end or both ends of either an antisense or sense strand of a dsRNA.

[0152] A dsRNA can be synthesized by standard methods known in the art as further discussed below, e.g., by use of an automated DNA synthesizer, such as are commercially available from, for example, Biosearch, Applied Biosystems, Inc.

[0153] iRNA compounds of the invention may be prepared using a two-step procedure. First, the individual strands of the double-stranded RNA molecule are prepared separately. Then, the component strands are annealed. The individual strands of the siRNA compound can be prepared using solution-phase or solid-phase organic synthesis or both. Organic synthesis offers the advantage that the oligonucleotide strands comprising unnatural or modified nucleotides can be easily prepared. Single-stranded oligonucleotides of the invention can be prepared using solution-phase or solid-phase organic synthesis or both.

[0154] In one aspect, a dsRNA of the invention includes at least two nucleotide sequences, a sense sequence and an anti-sense sequence. The sense strand is selected from the group of sequences provided in any one of Tables 3, 4, 8, 11, 12, 14, 15, 20, and 21, and the corresponding antisense strand of the sense strand is selected from the group of sequences of any one of Tables 3, 4, 8, 11, 12, 14, 15, 20, and 21. In this aspect, one of the two sequences is complementary to the other of the two sequences, with one of the sequences being substantially complementary to a sequence of an mRNA generated in the expression of a Serpinc1gene. As such, in this aspect, a dsRNA will include two oligonucleotides, where one oligonucleotide is described as the sense strand in any one of Tables 3, 4, 8, 11, 12, 14, 15, 20, and 21, and the second oligonucleotide is described as the corresponding antisense strand of the sense strand in any one of Tables 3, 4, 8, 11, 12, 14, 15, 20, and 21. In one embodiment, the substantially complementary sequences of the dsRNA are contained on separate oligonucleotides. In another embodiment, the substantially complementary sequences of the dsRNA are contained on a single oligonucleotide.

[0155] It will be understood that, although some of the sequences in Tables 3, 4, 8, 11, 12, 14, 15, 20, and 21 are described as modified and/or conjugated sequences, the RNA of the iRNA of the invention e.g., a dsRNA of the invention, may comprise any one of the sequences set forth in Tables 3, 4, 8, 11, 12, 14, 15, 20, and 21 that is un-modified, un-conjugated, and/or modified and/or conjugated differently than described therein.

[0156] The skilled person is well aware that dsRNAs having a duplex structure of between about 20 and 23 base pairs, e.g., 21, base pairs have been hailed as particularly effective in inducing RNA interference (Elbashir et al., EMBO 2001, 20:6877-6888). However, others have found that shorter or longer RNA duplex structures can also be effective (Chu and Rana (2007) RNA 14:1714-1719; Kim et al., (2005) Nat Biotech 23:222-226). In the embodiments described above, by virtue of the nature of the oligonucleotide sequences provided in any one of Tables 3, 4, 8, 11, 12, 14, 15, 20, and 21, dsRNAs described herein can include at least one strand of a length of minimally 21 nucleotides. It can be reasonably expected that shorter duplexes having one of the sequences of any one of Tables 3, 4, 8, 11, 12, 14, 15, 20, and 21 minus only a few nucleotides on one or both ends can be similarly effective as compared to the dsRNAs described above. Hence, dsRNAs having a sequence of at least 15, 16, 17, 18, 19, 20, or more contiguous nucleotides derived from one of the sequences of any one of Tables 3, 4, 8, 11, 12, 14, 15, 20, and 21, and differing in their ability to inhibit the expression of a Serpinc1 gene by not more than about 5, 10, 15, 20, 25, or 30% inhibition from a dsRNA comprising the full sequence, are contemplated to be within the scope of the present invention.

[0157] In addition, the RNAs provided in any one of Tables 3, 4, 8, 11, 12, 14, 15, 20, and 21 identify a site(s) in a Serpinc1 transcript that is susceptible to RISC-mediated cleavage. As such, the present invention further features iRNAs that target within one of these sites. As used herein, an iRNA is said to target within a particular site of an RNA transcript if the iRNA promotes cleavage of the transcript anywhere within that particular site. Such an iRNA will generally include at least about 15 contiguous nucleotides from one of the sequences provided in any one of Tables 3, 4, 8, 11, 12, 14, 15, 20, and 21 coupled to additional nucleotide sequences taken from the region contiguous to the selected sequence in a Serpinc1 gene.

[0158] While a target sequence is generally about 15-30 nucleotides in length, there is wide variation in the suitability of particular sequences in this range for directing cleavage of any given target RNA. Various software packages and the guidelines set out herein provide guidance for the identification of optimal target sequences for any given gene target, but an empirical approach can also be taken in which a “window” or “mask” of a given size (as a non-limiting example, 21 nucleotides) is literally or figuratively (including, e.g., in silico) placed on the target RNA sequence to identify sequences in the size range that can serve as target sequences. By moving the sequence “window” progressively one nucleotide upstream or downstream of an initial target sequence location, the next potential target sequence can be identified, until the complete set of possible sequences is identified for any given target size selected. This process, coupled with systematic synthesis and testing of the identified sequences (using assays as described herein or as known in the art) to identify those sequences that perform optimally can identify those RNA sequences that, when targeted with an iRNA agent, mediate the best inhibition of target gene expression. Thus, while the sequences identified, for example, in any one of Tables 3, 4, 8, 11, 12, 14, 15, 20, and 21 represent effective target sequences, it is contemplated that further optimization of inhibition efficiency can be achieved by progressively “walking the window” one nucleotide upstream or downstream of the given sequences to identify sequences with equal or better inhibition characteristics.

[0159] Further, it is contemplated that for any sequence identified, e.g., in any one of Tables 3, 4, 8, 11, 12, 14, 15, 20, and 21, further optimization could be achieved by systematically either adding or removing nucleotides to generate longer or shorter sequences and testing those sequences generated by walking a window of the longer or shorter size up or down the target RNA from that point. Again, coupling this approach to generating new candidate targets with testing for effectiveness of iRNAs based on those target sequences in an inhibition assay as known in the art and/or as described herein can lead to further improvements in the efficiency of inhibition. Further still, such optimized sequences can be adjusted by, e.g., the introduction of modified nucleotides as described herein or as known in the art, addition or changes in overhang, or other modifications as known in the art and/or discussed herein to further optimize the molecule (e.g., increasing serum stability or circulating half-life, increasing thermal stability, enhancing transmembrane delivery, targeting to a particular location or cell type, increasing interaction with silencing pathway enzymes, increasing release from endosomes) as an expression inhibitor.

[0160] An iRNA as described herein can contain one or more mismatches to the target sequence. In one embodiment, an iRNA as described herein contains no more than 3 mismatches. If the antisense strand of the iRNA contains mismatches to a target sequence, it is preferable that the area of mismatch is not located in the center of the region of complementarity. If the antisense strand of the iRNA contains mismatches to the target sequence, it is preferable that the mismatch be restricted to be within the last 5 nucleotides from either the 5′- or 3′-end of the region of complementarity. For example, for a 23 nucleotide iRNA agent the strand which is complementary to a region of a Serpinc1 gene, generally does not contain any mismatch within the central 13 nucleotides. The methods described herein or methods known in the art can be used to determine whether an iRNA containing a mismatch to a target sequence is effective in inhibiting the expression of a Serpinc1 gene. Consideration of the efficacy of iRNAs with mismatches in inhibiting expression of a Serpinc1 gene is important, especially if the particular region of complementarity in a Serpinc1 gene is known to have polymorphic sequence variation within the population.

### III. Modified iRNAs of the Invention

[0161] In one embodiment, the RNA of the iRNA of the invention e.g., a dsRNA, is un-modified, and does not comprise, e.g., chemical modifications and/or conjugations known in the art and described herein. In another embodiment, the RNA of an iRNA of the invention, e.g., a dsRNA, is chemically modified to enhance stability or other beneficial characteristics. The nucleic acids featured in the invention can be synthesized and/or modified by methods well established in the art, such as those described in “Current protocols in nucleic acid chemistry,” Beaucage, S. L. et al., (Edrs.), John Wiley & Sons, Inc., New York, NY, USA, which is hereby incorporated herein by reference. Modifications include, for example, end modifications, e.g., 5′-end modifications (phosphorylation, conjugation, inverted linkages) or 3′-end modifications (conjugation, DNA nucleotides, inverted linkages, etc.); base modifications, e.g., replacement with stabilizing bases, destabilizing bases, or bases that base pair with an expanded repertoire of partners, removal of bases (abasic nucleotides), or conjugated bases; sugar modifications (e.g., at the 2′-position or 4′-position) or replacement of the sugar; and/or backbone modifications, including modification or replacement of the phosphodiester linkages. Specific examples of iRNA compounds useful in the embodiments described herein include, but are not limited to RNAs containing modified backbones or no natural internucleoside linkages. RNAs having modified backbones include, among others, those that do not have a phosphorus atom in the backbone. For the purposes of this specification, and as sometimes referenced in the art, modified RNAs that do not have a phosphorus atom in their internucleoside backbone can also be considered to be oligonucleosides. In some embodiments, a modified iRNA will have a phosphorus atom in its internucleoside backbone.

[0162] Modified RNA backbones include, for example, phosphorothioates, chiral phosphorothioates, phosphorodithioates, phosphotriesters, aminoalkylphosphotriesters, methyl and other alkyl phosphonates including 3′-alkylene phosphonates and chiral phosphonates, phosphinates, phosphoramidates including 3′-amino phosphoramidate and aminoalkylphosphoramidates, thionophosphoramidates, thionoalkylphosphonates, thionoalkylphosphotriesters, and boranophosphates having normal 3′-5′ linkages, 2′-5′-linked analogs of these, and those having inverted polarity wherein the adjacent pairs of nucleoside units are linked 3′-5′ to 5′-3′ or 2′-5′ to 5′-2′. Various salts, mixed salts and free acid forms are also included.

[0163] Representative U.S. patents that teach the preparation of the above phosphorus-containing linkages include, but are not limited to, U.S. Pat. Nos. 3,687,808; 4,469,863; 4,476,301; 5,023,243; 5,177,195; 5,188,897; 5,264,423; 5,276,019; 5,278,302; 5,286,717; 5,321,131; 5,399,676; 5,405,939; 5,453,496; 5,455,233; 5,466,677; 5,476,925; 5,519,126; 5,536,821; 5,541,316; 5,550,111; 5,563,253; 5,571,799; 5,587,361; 5,625,050; 6,028,188; 6,124,445; 6,160,109; 6,169,170; 6,172,209; 6,239,265; 6,277,603; 6,326,199; 6,346,614; 6,444,423; 6,531,590; 6,534,639; 6,608,035; 6,683,167; 6,858,715; 6,867,294; 6,878,805; 7,015,315; 7,041,816; 7,273,933; 7,321,029; and U.S. Pat. No. RE39,464, the entire contents of each of which are hereby incorporated herein by reference.

[0164] Modified RNA backbones that do not include a phosphorus atom therein have backbones that are formed by short chain alkyl or cycloalkyl internucleoside linkages, mixed heteroatoms and alkyl or cycloalkyl internucleoside linkages, or one or more short chain heteroatomic or heterocyclic internucleoside linkages. These include those having morpholino linkages (formed in part from the sugar portion of a nucleoside); siloxane backbones; sulfide, sulfoxide and sulfone backbones; formacetyl and thioformacetyl backbones; methylene formacetyl and thioformacetyl backbones; alkene containing backbones; sulfamate backbones; methyleneimino and methylenehydrazino backbones; sulfonate and sulfonamide backbones; amide backbones; and others having mixed N, O, S and CH₂ component parts.

[0165] Representative U.S. patents that teach the preparation of the above oligonucleosides include, but are not limited to, U.S. Pat. Nos. 5,034,506; 5,166,315; 5,185,444; 5,214,134; 5,216,141; 5,235,033; 5,64,562; 5,264,564; 5,405,938; 5,434,257; 5,466,677; 5,470,967; 5,489,677; 5,541,307; 5,561,225; 5,596,086; 5,602,240; 5,608,046; 5,610,289; 5,618,704; 5,623,070; 5,663,312; 5,633,360; 5,677,437; and, 5,677,439, the entire contents of each of which are hereby incorporated herein by reference.

[0166] In other embodiments, suitable RNA mimetics are contemplated for use in iRNAs, in which both the sugar and the internucleoside linkage, i.e., the backbone, of the nucleotide units are replaced with novel groups. The base units are maintained for hybridization with an appropriate nucleic acid target compound. One such oligomeric compound, an RNA mimetic that has been shown to have excellent hybridization properties, is referred to as a peptide nucleic acid (PNA). In PNA compounds, the sugar backbone of an RNA is replaced with an amide containing backbone, in particular an aminoethylglycine backbone. The nucleobases are retained and are bound directly or indirectly to aza nitrogen atoms of the amide portion of the backbone. Representative U.S. patents that teach the preparation of PNA compounds include, but are not limited to, U.S. Pat. Nos. 5,539,082; 5,714,331; and 5,719,262, the entire contents of each of which are hereby incorporated herein by reference. Additional PNA compounds suitable for use in the iRNAs of the invention are described in, for example, in Nielsen et al., Science, 1991, 254, 1497-1500.

[0167] Some embodiments featured in the invention include RNAs with phosphorothioate backbones and oligonucleosides with heteroatom backbones, and in particular —CH₂—NH—CH₂—, —CH₂—N(CH₃)—O—CH₂—[known as a methylene (methylimino) or MMI backbone], —CH₂—O—N(CH₃)—CH₂—, —CH₂—N(CH₃)—N(CH₃)—CH₂— and —N(CH₃)—CH₂—CH₂—[wherein the native phosphodiester backbone is represented as —O—P—O—CH₂—] of the above-referenced U.S. Pat. No. 5,489,677, and the amide backbones of the above-referenced U.S. Pat. No. 5,602,240. In some embodiments, the RNAs featured herein have morpholino backbone structures of the above-referenced U.S. Pat. No. 5,034,506.

[0168] Modified RNAs can also contain one or more substituted sugar moieties. The iRNAs, e.g., dsRNAs, featured herein can include one of the following at the 2′-position: OH; F; O-, S-, or N-alkyl; O-, S-, or N-alkenyl; O-, S- or N-alkynyl; or O-alkyl-O-alkyl, wherein the alkyl, alkenyl and alkynyl can be substituted or unsubstituted C₁ to C₁₀ alkyl or C₂ to C₁₀ alkenyl and alkynyl. Exemplary suitable modifications include O[(CH₂)ₙO]ₘCH₃, O(CH₂)₋ₙOCH₃, O(CH₂)ₙNH₂, O(CH₂)ₙCH₃, O(CH₂)ₙONH₂, and O(CH₂)ₙON[(CH₂)ₙCH₃)]₂, where n and m are from 1 to about 10. In other embodiments, dsRNAs include one of the following at the 2′ position: C₁ to C₁₀ lower alkyl, substituted lower alkyl, alkaryl, aralkyl, O-alkaryl or O-aralkyl, SH, SCH₃, OCN, Cl, Br, CN, CF₃, OCF₃, SOCH₃, SO₂CH₃, ONO₂, NO₂, N₃, NH₂, heterocycloalkyl, heterocycloalkaryl, aminoalkylamino, polyalkylamino, substituted silyl, an RNA cleaving group, a reporter group, an intercalator, a group for improving the pharmacokinetic properties of an iRNA, or a group for improving the pharmacodynamic properties of an iRNA, and other substituents having similar properties. In some embodiments, the modification includes a 2′-methoxyethoxy (2′-O—CH₂CH₂OCH₃, also known as 2′-O-(2-methoxyethyl) or 2′-MOE) (Martin et al., Helv. Chim. Acta, 1995, 78:486-504) i.e., an alkoxy-alkoxy group. Another exemplary modification is 2′-dimethylaminooxyethoxy, i.e., a O(CH₂)₂ON(CH₃)₂ group, also known as 2′-DMAOE, as described in examples herein below, and 2′-dimethylaminoethoxyethoxy (also known in the art as 2′-O-dimethylaminoethoxyethyl or 2′-DMAEOE), i.e 2′-O—CH₂—O—CH₂—N(CH₂)₂.

[0169] Other modifications include 2′-methoxy (2′-OCH₃), 2′-aminopropoxy (2′-OCH₂CH₂CH₂NH₂) and 2′-fluoro (2′-F). Similar modifications can also be made at other positions on the RNA of an iRNA, particularly the 3′ position of the sugar on the 3′ terminal nucleotide or in 2′-5′ linked dsRNAs and the 5′ position of 5′ terminal nucleotide. iRNAs can also have sugar mimetics such as cyclobutyl moieties in place of the pentofuranosyl sugar. Representative U.S. patents that teach the preparation of such modified sugar structures include, but are not limited to, U.S. Pat. Nos. 4,981,957; 5,118,800; 5,319,080; 5,359,044; 5,393,878; 5,446,137; 5,466,786; 5,514,785; 5,519,134; 5,567,811; 5,576,427; 5,591,722; 5,597,909; 5,610,300; 5,627,053; 5,639,873; 5,646,265; 5,658,873; 5,670,633; and 5,700,920, certain of which are commonly owned with the instant application. The entire contents of each of the foregoing are hereby incorporated herein by reference.

[0170] An iRNA can also include nucleobase (often referred to in the art simply as “base”) modifications or substitutions. As used herein, “unmodified” or “natural” nucleobases include the purine bases adenine (A) and guanine (G), and the pyrimidine bases thymine (T), cytosine (C) and uracil (U). Modified nucleobases include other synthetic and natural nucleobases such as 5-methylcytosine (5-me-C), 5-hydroxymethyl cytosine, xanthine, hypoxanthine, 2-aminoadenine, 6-methyl and other alkyl derivatives of adenine and guanine, 2-propyl and other alkyl derivatives of adenine and guanine, 2-thiouracil, 2-thiothymine and 2-thiocytosine, 5-halouracil and cytosine, 5-propynyl uracil and cytosine, 6-azo uracil, cytosine and thymine, 5-uracil (pseudouracil), 4-thiouracil, 8-halo, 8-amino, 8-thiol, 8-thioalkyl, 8-hydroxyl anal other 8-substituted adenines and guanines, 5-halo, particularly 5-bromo, 5-trifluoromethyl and other 5-substituted uracils and cytosines, 7-methylguanine and 7-methyladenine, 8-azaguanine and 8-azaadenine, 7-deazaguanine and 7-deazaadenine and 3-deazaguanine and 3-deazaadenine. Further nucleobases include those disclosed in U.S. Pat. No. 3,687,808, those disclosed in Modified Nucleosides in Biochemistry, Biotechnology and Medicine, Herdewijn, P. ed. Wiley-VCH, 2008; those disclosed in The Concise Encyclopedia Of Polymer Science And Engineering, pages 858-859, Kroschwitz, J. L, ed. John Wiley & Sons, 1990, these disclosed by Englisch et al., Angewandte Chemie, International Edition, 1991, 30, 613, and those disclosed by Sanghvi, Y S., Chapter 15, dsRNA Research and Applications, pages 289-302, Crooke, S. T. and Lebleu, B., Ed., CRC Press, 1993. Certain of these nucleobases are particularly useful for increasing the binding affinity of the oligomeric compounds featured in the invention. These include 5-substituted pyrimidines, 6-azapyrimidines and N-2, N-6 and 0-6 substituted purines, including 2-aminopropyladenine, 5-propynyluracil and 5-propynylcytosine. 5-methylcytosine substitutions have been shown to increase nucleic acid duplex stability by 0.6-1.2° C. (Sanghvi, Y. S., Crooke, S. T. and Lebleu, B., Eds., dsRNA Research and Applications, CRC Press, Boca Raton, 1993, pp. 276-278) and are exemplary base substitutions, even more particularly when combined with 2′-O-methoxyethyl sugar modifications.

[0171] Representative U.S. patents that teach the preparation of certain of the above noted modified nucleobases as well as other modified nucleobases include, but are not limited to, the above noted U.S. Pat. Nos. 3,687,808, 4,845,205; 5,130,30; 5,134,066; 5,175,273; 5,367,066; 5,432,272; 5,457,187; 5,459,255; 5,484,908; 5,502,177; 5,525,711; 5,552,540; 5,587,469; 5,594,121; 5,596,091; 5,614,617; 5,681,941; 5,750,692; 6,015,886; 6,147,200; 6,166,197; 6,222,025; 6,235,887; 6,380,368; 6,528,640; 6,639,062; 6,617,438; 7,045,610; 7,427,672; and 7,495,088, the entire contents of each of which are hereby incorporated herein by reference.

[0172] The RNA of an iRNA can also be modified to include one or more locked nucleic acids (LNA). A locked nucleic acid is a nucleotide having a modified ribose moiety in which the ribose moiety comprises an extra bridge connecting the 2′ and 4′ carbons. This structure effectively “locks” the ribose in the 3′-endo structural conformation. The addition of locked nucleic acids to siRNAs has been shown to increase siRNA stability in serum, and to reduce off-target effects (Elmen, J. et al., (2005) Nucleic Acids Research 33(1):439-447; Mook, O R. et al., (2007) Mol Canc Ther 6(3):833-843; Grunweller, A. et al., (2003) Nucleic Acids Research 31(12):3185-3193).

[0173] Representative U.S. patents that teach the preparation of locked nucleic acid nucleotides include, but are not limited to, the following: U.S. Pat. Nos. 6,268,490; 6,670,461; 6,794,499; 6,998,484; 7,053,207; 7,084,125; and 7,399,845, the entire contents of each of which are hereby incorporated herein by reference.

[0174] Potentially stabilizing modifications to the ends of RNA molecules can include N-(acetylaminocaproyl)-4-hydroxyprolinol (Hyp-C6-NHAc), N-(caproyl-4-hydroxyprolinol (Hyp-C6), N-(acetyl-4-hydroxyprolinol (Hyp-NHAc), thymidine-2′-O-deoxythymidine (ether), N-(aminocaproyl)-4-hydroxyprolinol (Hyp-C6-amino), 2-docosanoyl-uridine-3″-phosphate, inverted base dT(idT) and others. Disclosure of this modification can be found in PCT Publication No. WO 2011/005861.

### IV. iRNAs Conjugated to Ligands

[0175] Another modification of the RNA of an iRNA of the invention involves chemically linking to the RNA one or more ligands, moieties or conjugates that enhance the activity, cellular distribution or cellular uptake of the iRNA. Such moieties include but are not limited to lipid moieties such as a cholesterol moiety (Letsinger et al., Proc. Natl. Acid. Sci. USA, 1989, 86: 6553-6556), cholic acid (Manoharan et al., Biorg. Med. Chem. Let., 1994, 4:1053-1060), a thioether, e.g., beryl-S-tritylthiol (Manoharan et al., Ann. N.Y. Acad. Sci., 1992, 660:306-309; Manoharan et al., Biorg. Med. Chem. Let., 1993, 3:2765-2770), a thiocholesterol (Oberhauser et al., Nucl. Acids Res., 1992, 20:533-538), an aliphatic chain, e.g., dodecandiol or undecyl residues (Saison-Behmoaras et al., EMBO J, 1991, 10:1111-1118; Kabanov et al., FEBS Lett., 1990, 259:327-330; Svinarchuk et al., Biochimie, 1993, 75:49-54), a phospholipid, e.g., di-hexadecyl-rac-glycerol or triethyl-ammonium 1,2-di-O-hexadecyl-rac-glycero-3-phosphonate (Manoharan et al., Tetrahedron Lett., 1995, 36:3651-3654; Shea et al., Nucl. Acids Res., 1990, 18:3777-3783), a polyamine or a polyethylene glycol chain (Manoharan et al., Nucleosides & Nucleotides, 1995, 14:969-973), or adamantane acetic acid (Manoharan et al., Tetrahedron Lett., 1995, 36:3651-3654), a palmityl moiety (Mishra et al., Biochim. Biophys. Acta, 1995, 1264:229-237), or an octadecylamine or hexylamino-carbonyloxycholesterol moiety (Crooke et al., J. Pharmacol. Exp. Ther., 1996, 277:923-937).

[0176] In one embodiment, a ligand alters the distribution, targeting or lifetime of an iRNA agent into which it is incorporated. In preferred embodiments a ligand provides an enhanced affinity for a selected target, e.g., molecule, cell or cell type, compartment, e.g., a cellular or organ compartment, tissue, organ or region of the body, as, e.g., compared to a species absent such a ligand. Preferred ligands will not take part in duplex pairing in a duplexed nucleic acid.

[0177] Ligands can include a naturally occurring substance, such as a protein (e.g., human serum albumin (HSA), low-density lipoprotein (LDL), or globulin); carbohydrate (e.g., a dextran, pullulan, chitin, chitosan, inulin, cyclodextrin, N-acetylgalactosamine, or hyaluronic acid); or a lipid. The ligand can also be a recombinant or synthetic molecule, such as a synthetic polymer, e.g., a synthetic polyamino acid. Examples of polyamino acids include polyamino acid is a polylysine (PLL), poly L-aspartic acid, poly L-glutamic acid, styrene-maleic acid anhydride copolymer, poly(L-lactide-co-glycolied) copolymer, divinyl ether-maleic anhydride copolymer, N-(2-hydroxypropyl)methacrylamide copolymer (HMPA), polyethylene glycol (PEG), polyvinyl alcohol (PVA), polyurethane, poly(2-ethylacrylic acid), N-isopropylacrylamide polymers, or polyphosphazine. Example of polyamines include: polyethylenimine, polylysine (PLL), spermine, spermidine, polyamine, pseudopeptide-polyamine, peptidomimetic polyamine, dendrimer polyamine, arginine, amidine, protamine, cationic lipid, cationic porphyrin, quaternary salt of a polyamine, or an alpha helical peptide.

[0178] Ligands can also include targeting groups, e.g., a cell or tissue targeting agent, e.g., a lectin, glycoprotein, lipid or protein, e.g., an antibody, that binds to a specified cell type such as a kidney cell. A targeting group can be a thyrotropin, melanotropin, lectin, glycoprotein, surfactant protein A, Mucin carbohydrate, multivalent lactose, multivalent galactose, N-acetyl-galactosamine, N-acetyl-gulucoseamine multivalent mannose, multivalent fucose, glycosylated polyaminoacids, multivalent galactose, transferrin, bisphosphonate, polyglutamate, polyaspartate, a lipid, cholesterol, a steroid, bile acid, folate, vitamin B12, vitamin A, biotin, or an RGD peptide or RGD peptide mimetic.

[0179] Other examples of ligands include dyes, intercalating agents (e.g. acridines), cross-linkers (e.g. psoralene, mitomycin C), porphyrins (TPPC4, texaphyrin, Sapphyrin), polycyclic aromatic hydrocarbons (e.g., phenazine, dihydrophenazine), artificial endonucleases (e.g. EDTA), lipophilic molecules, e.g., cholesterol, cholic acid, adamantane acetic acid, 1-pyrene butyric acid, dihydrotestosterone, 1,3-Bis-O(hexadecyl)glycerol, geranyloxyhexyl group, hexadecylglycerol, borneol, menthol, 1,3-propanediol, heptadecyl group, palmitic acid, myristic acid,O3-(oleoyl)lithocholic acid, O3-(oleoyl)cholenic acid, dimethoxytrityl, or phenoxazine) and peptide conjugates (e.g., antennapedia peptide, Tat peptide), alkylating agents, phosphate, amino, mercapto, PEG (e.g., PEG-40K), MPEG, [MPEG]₂, polyamino, alkyl, substituted alkyl, radiolabeled markers, enzymes, haptens (e.g. biotin), transport/absorption facilitators (e.g., aspirin, vitamin E, folic acid), synthetic ribonucleases (e.g., imidazole, bisimidazole, histamine, imidazole clusters, acridine-imidazole conjugates, Eu3+ complexes of tetraazamacrocycles), dinitrophenyl, HRP, or AP.

[0180] Ligands can be proteins, e.g., glycoproteins, or peptides, e.g., molecules having a specific affinity for a co-ligand, or antibodies e.g., an antibody, that binds to a specified cell type such as a hepatic cell. Ligands can also include hormones and hormone receptors. They can also include non-peptidic species, such as lipids, lectins, carbohydrates, vitamins, cofactors, multivalent lactose, multivalent galactose, N-acetyl-galactosamine, N-acetyl-gulucosamine multivalent mannose, or multivalent fucose. The ligand can be, for example, a lipopolysaccharide, an activator of p38 MAP kinase, or an activator of NF-κB.

[0181] The ligand can be a substance, e.g., a drug, which can increase the uptake of the iRNA agent into the cell, for example, by disrupting the cell's cytoskeleton, e.g., by disrupting the cell's microtubules, microfilaments, and/or intermediate filaments. The drug can be, for example, taxon, vincristine, vinblastine, cytochalasin, nocodazole, japlakinolide, latrunculin A, phalloidin, swinholide A, indanocine, or myoseverin.

[0182] In some embodiments, a ligand attached to an iRNA as described herein acts as a pharmacokinetic modulator (PK modulator). PK modulators include lipophiles, bile acids, steroids, phospholipid analogues, peptides, protein binding agents, PEG, vitamins etc. Exemplary PK modulators include, but are not limited to, cholesterol, fatty acids, cholic acid, lithocholic acid, dialkylglycerides, diacylglyceride, phospholipids, sphingolipids, naproxen, ibuprofen, vitamin E, biotin etc. Oligonucleotides that comprise a number of phosphorothioate linkages are also known to bind to serum protein, thus short oligonucleotides, e.g., oligonucleotides of about 5 bases, 10 bases, 15 bases or 20 bases, comprising multiple of phosphorothioate linkages in the backbone are also amenable to the present invention as ligands (e.g. as PK modulating ligands). In addition, aptamers that bind serum components (e.g. serum proteins) are also suitable for use as PK modulating ligands in the embodiments described herein.

[0183] Ligand-conjugated oligonucleotides of the invention may be synthesized by the use of an oligonucleotide that bears a pendant reactive functionality, such as that derived from the attachment of a linking molecule onto the oligonucleotide (described below). This reactive oligonucleotide may be reacted directly with commercially-available ligands, ligands that are synthesized bearing any of a variety of protecting groups, or ligands that have a linking moiety attached thereto.

[0184] The oligonucleotides used in the conjugates of the present invention may be conveniently and routinely made through the well-known technique of solid-phase synthesis. Equipment for such synthesis is sold by several vendors including, for example, Applied Biosystems (Foster City, Calif). Any other means for such synthesis known in the art may additionally or alternatively be employed. It is also known to use similar techniques to prepare other oligonucleotides, such as the phosphorothioates and alkylated derivatives.

[0185] In the ligand-conjugated oligonucleotides and ligand-molecule bearing sequence-specific linked nucleosides of the present invention, the oligonucleotides and oligonucleosides may be assembled on a suitable DNA synthesizer utilizing standard nucleotide or nucleoside precursors, or nucleotide or nucleoside conjugate precursors that already bear the linking moiety, ligand-nucleotide or nucleoside-conjugate precursors that already bear the ligand molecule, or non-nucleoside ligand-bearing building blocks.

[0186] When using nucleotide-conjugate precursors that already bear a linking moiety, the synthesis of the sequence-specific linked nucleosides is typically completed, and the ligand molecule is then reacted with the linking moiety to form the ligand-conjugated oligonucleotide. In some embodiments, the oligonucleotides or linked nucleosides of the present invention are synthesized by an automated synthesizer using phosphoramidites derived from ligand-nucleoside conjugates in addition to the standard phosphoramidites and non-standard phosphoramidites that are commercially available and routinely used in oligonucleotide synthesis.

[0187] A. Lipid Conjugates

[0188] In one embodiment, the ligand or conjugate is a lipid or lipid-based molecule. Such a lipid or lipid-based molecule preferably binds a serum protein, e.g., human serum albumin (HSA). An HSA binding ligand allows for distribution of the conjugate to a target tissue, e.g., a non-kidney target tissue of the body. For example, the target tissue can be the liver, including parenchymal cells of the liver. Other molecules that can bind HSA can also be used as ligands. For example, naproxen or aspirin can be used. A lipid or lipid-based ligand can (a) increase resistance to degradation of the conjugate, (b) increase targeting or transport into a target cell or cell membrane, and/or (c) can be used to adjust binding to a serum protein, e.g., HSA.

[0189] A lipid-based ligand can be used to inhibit, e.g., control the binding of the conjugate to a target tissue. For example, a lipid or lipid-based ligand that binds to HSA more strongly will be less likely to be targeted to the kidney and therefore less likely to be cleared from the body. A lipid or lipid-based ligand that binds to HSA less strongly can be used to target the conjugate to the kidney.

[0190] In a preferred embodiment, the lipid-based ligand binds HSA. Preferably, it binds HSA with a sufficient affinity such that the conjugate will be preferably distributed to a non-kidney tissue. However, it is preferred that the affinity not be so strong that the HSA-ligand binding cannot be reversed.

[0191] In another preferred embodiment, the lipid-based ligand binds HSA weakly or not at all, such that the conjugate will be preferably distributed to the kidney. Other moieties that target to kidney cells can also be used in place of or in addition to the lipid-based ligand.

[0192] In another aspect, the ligand is a moiety, e.g., a vitamin, which is taken up by a target cell, e.g., a proliferating cell. These are particularly useful for treating disorders characterized by unwanted cell proliferation, e.g., of the malignant or non-malignant type, e.g., cancer cells. Exemplary vitamins include vitamin A, E, and K. Other exemplary vitamins include are B vitamin, e.g., folic acid, B12, riboflavin, biotin, pyridoxal or other vitamins or nutrients taken up by target cells such as liver cells. Also included are HSA and low-density lipoprotein (LDL).

[0193] B. Cell Permeation Agents

[0194] In another aspect, the ligand is a cell-permeation agent, preferably a helical cell-permeation agent. Preferably, the agent is amphipathic. An exemplary agent is a peptide such as tat or antennopedia. If the agent is a peptide, it can be modified, including a peptidylmimetic, invertomers, non-peptide or pseudo-peptide linkages, and use of D-amino acids. The helical agent is preferably an alpha-helical agent, which preferably has a lipophilic and a lipophobic phase.

[0195] The ligand can be a peptide or peptidomimetic. A peptidomimetic (also referred to herein as an oligopeptidomimetic) is a molecule capable of folding into a defined three-dimensional structure similar to a natural peptide. The attachment of peptide and peptidomimetics to iRNA agents can affect pharmacokinetic distribution of the iRNA, such as by enhancing cellular recognition and absorption. The peptide or peptidomimetic moiety can be about 5-50 amino acids long, e.g., about 5, 10, 15, 20, 25, 30, 35, 40, 45, or 50 amino acids long.

[0196] A peptide or peptidomimetic can be, for example, a cell permeation peptide, cationic peptide, amphipathic peptide, or hydrophobic peptide (e.g., consisting primarily of Tyr, Trp or Phe). The peptide moiety can be a dendrimer peptide, constrained peptide or crosslinked peptide. In another alternative, the peptide moiety can include a hydrophobic membrane translocation sequence (MTS). An exemplary hydrophobic MTS-containing peptide is RFGF having the amino acid sequence AAVALLPAVLLALLAP (SEQ ID NO: 9). An RFGF analogue (e.g., amino acid sequence AALLPVLLAAP (SEQ ID NO: 10) containing a hydrophobic MTS can also be a targeting moiety. The peptide moiety can be a “delivery” peptide, which can carry large polar molecules including peptides, oligonucleotides, and protein across cell membranes. For example, sequences from the HIV Tat protein (GRKKRRQRRRPPQ (SEQ ID NO: 11) and the Drosophila Antennapedia protein (RQIKIWFQNRRMKWKK (SEQ ID NO: 12) have been found to be capable of functioning as delivery peptides. A peptide or peptidomimetic can be encoded by a random sequence of DNA, such as a peptide identified from a phage-display library, or one-bead-one-compound (OBOC) combinatorial library (Lam et al., Nature, 354:82-84, 1991). Examples of a peptide or peptidomimetic tethered to a dsRNA agent via an incorporated monomer unit for cell targeting purposes is an arginine-glycine-aspartic acid (RGD)-peptide, or RGD mimic. A peptide moiety can range in length from about 5 amino acids to about 40 amino acids. The peptide moieties can have a structural modification, such as to increase stability or direct conformational properties. Any of the structural modifications described below can be utilized.

[0197] An RGD peptide for use in the compositions and methods of the invention may be linear or cyclic, and may be modified, e.g., glycosylated or methylated, to facilitate targeting to a specific tissue(s). RGD-containing peptides and peptidomimetics may include D-amino acids, as well as synthetic RGD mimics. In addition to RGD, one can use other moieties that target the integrin ligand. Preferred conjugates of this ligand target PECAM-1 or VEGF.

[0198] A “cell permeation peptide” is capable of permeating a cell, e.g., a microbial cell, such as a bacterial or fungal cell, or a mammalian cell, such as a human cell. A microbial cell-permeating peptide can be, for example, a α-helical linear peptide (e.g., LL-37 or Ceropin P1), a disulfide bond-containing peptide (e.g., α-defensin, β-defensin or bactenecin), or a peptide containing only one or two dominating amino acids (e.g., PR-39 or indolicidin). A cell permeation peptide can also include a nuclear localization signal (NLS). For example, a cell permeation peptide can be a bipartite amphipathic peptide, such as MPG, which is derived from the fusion peptide domain of HIV-1 gp41 and the NLS of SV40 large T antigen (Simeoni et al., Nucl. Acids Res. 31:2717-2724, 2003).

[0199] C. Carbohydrate Conjugates

[0200] In some embodiments of the compositions and methods of the invention, an iRNA oligonucleotide further comprises a carbohydrate. The carbohydrate conjugated iRNA are advantageous for the in vivo delivery of nucleic acids, as well as compositions suitable for in vivo therapeutic use, as described herein. As used herein, “carbohydrate” refers to a compound which is either a carbohydrate per se made up of one or more monosaccharide units having at least 6 carbon atoms (which can be linear, branched or cyclic) with an oxygen, nitrogen or sulfur atom bonded to each carbon atom; or a compound having as a part thereof a carbohydrate moiety made up of one or more monosaccharide units each having at least six carbon atoms (which can be linear, branched or cyclic), with an oxygen, nitrogen or sulfur atom bonded to each carbon atom. Representative carbohydrates include the sugars (mono-, di-, tri- and oligosaccharides containing from about 4, 5, 6, 7, 8, or 9 monosaccharide units), and polysaccharides such as starches, glycogen, cellulose and polysaccharide gums. Specific monosaccharides include C5 and above (e.g., C5, C6, C7, or C8) sugars; di- and trisaccharides include sugars having two or three monosaccharide units (e.g., C5, C6, C7, or C8).

[0201] In one embodiment, a carbohydrate conjugate for use in the compositions and methods of the invention is a monosaccharide. In one embodiment, the monosaccharide is an N-acetylgalactosamine, such as

[chemical structure]

[0202] In another embodiment, a carbohydrate conjugate for use in the compositions and methods of the invention is selected from the group consisting of:

[chemical structure]

[chemical structure]

[chemical structure]

[chemical structure]

[chemical structure]

[0203] Another representative carbohydrate conjugate for use in the embodiments described herein includes, but is not limited to,

[chemical structure]

[0204] (Formula XXIII), when one of X or Y is an oligonucleotide, the other is a hydrogen.

[0205] In some embodiments, the carbohydrate conjugate further comprises one or more additional ligands as described above, such as, but not limited to, a PK modulator and/or a cell permeation peptide.

[0206] D. Linkers

[0207] In some embodiments, the conjugate or ligand described herein can be attached to an iRNA oligonucleotide with various linkers that can be cleavable or non-cleavable.

[0208] The term “linker” or “linking group” means an organic moiety that connects two parts of a compound, e.g., covalently attaches two parts of a compound. Linkers typically comprise a direct bond or an atom such as oxygen or sulfur, a unit such as NRB, C(O), C(O)NH, SO, SO₂, SO₂NH or a chain of atoms, such as, but not limited to, substituted or unsubstituted alkyl, substituted or unsubstituted alkenyl, substituted or unsubstituted alkynyl, arylalkyl, arylalkenyl, arylalkynyl, heteroarylalkyl, heteroarylalkenyl, heteroarylalkynyl, heterocyclylalkyl, heterocyclylalkenyl, heterocyclylalkynyl, aryl, heteroaryl, heterocyclyl, cycloalkyl, cycloalkenyl, alkylarylalkyl, alkylarylalkenyl, alkylarylalkynyl, alkenylarylalkyl, alkenylarylalkenyl, alkenylarylalkynyl, alkynylarylalkyl, alkynylarylalkenyl, alkynylarylalkynyl, alkylheteroarylalkyl, alkylheteroarylalkenyl, alkylheteroarylalkynyl, alkenylheteroarylalkyl, alkenylheteroarylalkenyl, alkenylheteroarylalkynyl, alkynylheteroarylalkyl, alkynylheteroarylalkenyl, alkynylheteroarylalkynyl, alkylheterocyclylalkyl, alkylheterocyclylalkenyl, alkylheterocyclylalkynyl, alkenylheterocyclylalkyl, alkenylheterocyclylalkenyl, alkenylheterocyclylalkynyl, alkynylheterocyclylalkyl, alkynylheterocyclylalkenyl, alkynylheterocyclylalkynyl, alkylaryl, alkenylaryl, alkynylaryl, alkylheteroaryl, alkenylheteroaryl, alkynylheteroaryl, which one or more methylenes can be interrupted or terminated by O, S, S(O), SO₂, N(R8), C(O), substituted or unsubstituted aryl, substituted or unsubstituted heteroaryl, substituted or unsubstituted heterocyclic; where R8 is hydrogen, acyl, aliphatic or substituted aliphatic. In one embodiment, the linker is between about 1-24 atoms, 2-24, 3-24, 4-24, 5-24, 6-24, 6-18, 7-18, 8-18 atoms, 7-17, 8-17, 6-16, 7-16, or 8-16 atoms.

[0209] A cleavable linking group is one which is sufficiently stable outside the cell, but which upon entry into a target cell is cleaved to release the two parts the linker is holding together. In a preferred embodiment, the cleavable linking group is cleaved at least about 10 times, 20, times, 30 times, 40 times, 50 times, 60 times, 70 times, 80 times, 90 times or more, or at least about 100 times faster in a target cell or under a first reference condition (which can, e.g., be selected to mimic or represent intracellular conditions) than in the blood of a subject, or under a second reference condition (which can, e.g., be selected to mimic or represent conditions found in the blood or serum).

[0210] Cleavable linking groups are susceptible to cleavage agents, e.g., pH, redox potential or the presence of degradative molecules. Generally, cleavage agents are more prevalent or found at higher levels or activities inside cells than in serum or blood. Examples of such degradative agents include: redox agents which are selected for particular substrates or which have no substrate specificity, including, e.g., oxidative or reductive enzymes or reductive agents such as mercaptans, present in cells, that can degrade a redox cleavable linking group by reduction; esterases; endosomes or agents that can create an acidic environment, e.g., those that result in a pH of five or lower; enzymes that can hydrolyze or degrade an acid cleavable linking group by acting as a general acid, peptidases (which can be substrate specific), and phosphatases.

[0211] A cleavable linkage group, such as a disulfide bond can be susceptible to pH. The pH of human serum is 7.4, while the average intracellular pH is slightly lower, ranging from about 7.1-7.3. Endosomes have a more acidic pH, in the range of 5.5-6.0, and lysosomes have an even more acidic pH at around 5.0. Some linkers will have a cleavable linking group that is cleaved at a preferred pH, thereby releasing a cationic lipid from the ligand inside the cell, or into the desired compartment of the cell.

[0212] A linker can include a cleavable linking group that is cleavable by a particular enzyme. The type of cleavable linking group incorporated into a linker can depend on the cell to be targeted. For example, a liver-targeting ligand can be linked to a cationic lipid through a linker that includes an ester group. Liver cells are rich in esterases, and therefore the linker will be cleaved more efficiently in liver cells than in cell types that are not esterase-rich. Other cell-types rich in esterases include cells of the lung, renal cortex, and testis.

[0213] Linkers that contain peptide bonds can be used when targeting cell types rich in peptidases, such as liver cells and synoviocytes.

[0214] In general, the suitability of a candidate cleavable linking group can be evaluated by testing the ability of a degradative agent (or condition) to cleave the candidate linking group. It will also be desirable to also test the candidate cleavable linking group for the ability to resist cleavage in the blood or when in contact with other non-target tissues. Thus, one can determine the relative susceptibility to cleavage between a first and a second condition, where the first is selected to be indicative of cleavage in a target cell and the second is selected to be indicative of cleavage in other tissues or biological fluids, e.g., blood or serum. The evaluations can be carried out in cell free systems, in cells, in cell culture, in organ or tissue culture, or in whole animals. It can be useful to make initial evaluations in cell-free or culture conditions and to confirm by further evaluations in whole animals. In preferred embodiments, useful candidate compounds are cleaved at least about 2, 4, 10, 20, 30, 40, 50, 60, 70, 80, 90, or about 100 times faster in the cell (or under in vitro conditions selected to mimic intracellular conditions) as compared to blood or serum (or under in vitro conditions selected to mimic extracellular conditions).

[0215] i. Redox Cleavable Linking Groups In one embodiment, a cleavable linking group is a redox cleavable linking group that is cleaved upon reduction or oxidation. An example of reductively cleavable linking group is a disulphide linking group (—S—S—). To determine if a candidate cleavable linking group is a suitable “reductively cleavable linking group,” or for example is suitable for use with a particular iRNA moiety and particular targeting agent one can look to methods described herein. For example, a candidate can be evaluated by incubation with dithiothreitol (DTT), or other reducing agent using reagents know in the art, which mimic the rate of cleavage which would be observed in a cell, e.g., a target cell. The candidates can also be evaluated under conditions which are selected to mimic blood or serum conditions. In one, candidate compounds are cleaved by at most about 10% in the blood. In other embodiments, useful candidate compounds are degraded at least about 2, 4, 10, 20, 30, 40, 50, 60, 70, 80, 90, or about 100 times faster in the cell (or under in vitro conditions selected to mimic intracellular conditions) as compared to blood (or under in vitro conditions selected to mimic extracellular conditions). The rate of cleavage of candidate compounds can be determined using standard enzyme kinetics assays under conditions chosen to mimic intracellular media and compared to conditions chosen to mimic extracellular media.

[0216] ii. Phosphate-Based Cleavable Linking Groups

[0217] In another embodiment, a cleavable linker comprises a phosphate-based cleavable linking group. A phosphate-based cleavable linking group is cleaved by agents that degrade or hydrolyze the phosphate group. An example of an agent that cleaves phosphate groups in cells are enzymes such as phosphatases in cells. Examples of phosphate-based linking groups are —O—P(O)(ORk)-O—, —O—P(S)(ORk)-O—, —O—P(S)(SRk)-O—, —S—P(O)(ORk)-O—, —O—P(O)(ORk)-S—, —S—P(O)(ORk)-S—, —O—P(S)(ORk)-S—, —S—P(S)(ORk)-O—, —O—P(O)(Rk)-O—, —O—P(S)(Rk)-O—, —S—P(O)(Rk)-O—, —S—P(S)(Rk)-O—, —S—P(O)(Rk)-S—, —O—P(S)(Rk)-S—. Preferred embodiments are —O—P(O)(OH)—O—, —O—P(S)(OH)—O—, —O—P(S)(SH)—O—, —S—P(O)(OH)—O—, —O—P(O)(OH)—S—, —S—P(O)(OH)—S—, —O—P(S)(OH)—S—, —S—P(S)(OH)—O—, —O—P(O)(H)—O—, —O—P(S)(H)—O—, —S—P(O)(H)—O, —S—P(S)(H)—O—, —S—P(O)(H)—S—, —O—P(S)(H)—S—. A preferred embodiment is —O—P(O)(OH)—O—. These candidates can be evaluated using methods analogous to those described above.

[0218] iii. Acid Cleavable Linking Groups

[0219] In another embodiment, a cleavable linker comprises an acid cleavable linking group. An acid cleavable linking group is a linking group that is cleaved under acidic conditions. In preferred embodiments acid cleavable linking groups are cleaved in an acidic environment with a pH of about 6.5 or lower (e.g., about 6.0, 5.75, 5.5, 5.25, 5.0, or lower), or by agents such as enzymes that can act as a general acid. In a cell, specific low pH organelles, such as endosomes and lysosomes can provide a cleaving environment for acid cleavable linking groups. Examples of acid cleavable linking groups include but are not limited to hydrazones, esters, and esters of amino acids. Acid cleavable groups can have the general formula —C═NN—, C(O)O, or —OC(O). A preferred embodiment is when the carbon attached to the oxygen of the ester (the alkoxy group) is an aryl group, substituted alkyl group, or tertiary alkyl group such as dimethyl pentyl or t-butyl. These candidates can be evaluated using methods analogous to those described above.

[0220] iv. Ester-Based Linking Groups

[0221] In another embodiment, a cleavable linker comprises an ester-based cleavable linking group. An ester-based cleavable linking group is cleaved by enzymes such as esterases and amidases in cells. Examples of ester-based cleavable linking groups include but are not limited to esters of alkylene, alkenylene and alkynylene groups. Ester cleavable linking groups have the general formula —C(O)O—, or —OC(O)—. These candidates can be evaluated using methods analogous to those described above.

[0222] v. Peptide-Based Cleaving Groups

[0223] In yet another embodiment, a cleavable linker comprises a peptide-based cleavable linking group. A peptide-based cleavable linking group is cleaved by enzymes such as peptidases and proteases in cells. Peptide-based cleavable linking groups are peptide bonds formed between amino acids to yield oligopeptides (e.g., dipeptides, tripeptides etc.) and polypeptides. Peptide-based cleavable groups do not include the amide group (—C(O)NH—). The amide group can be formed between any alkylene, alkenylene or alkynelene. A peptide bond is a special type of amide bond formed between amino acids to yield peptides and proteins. The peptide-based cleavage group is generally limited to the peptide bond (i.e., the amide bond) formed between amino acids yielding peptides and proteins and does not include the entire amide functional group. Peptide-based cleavable linking groups have the general formula —NHCHRAC(O)NHCHRBC(O), where RA and RB are the R groups of the two adjacent amino acids. These candidates can be evaluated using methods analogous to those described above.

[0224] In one embodiment, an iRNA of the invention is conjugated to a carbohydrate through a linker. Non-limiting examples of iRNA carbohydrate conjugates with linkers of the compositions and methods of the invention include, but are not limited to,

[chemical structure]

[chemical structure]

when one of X or Y is an oligonucleotide, the other is a hydrogen.

[0225] In certain embodiments of the compositions and methods of the invention, a ligand is one or more “GalNAc” (N-acetylgalactosamine) derivatives attached through a bivalent or trivalent branched linker.

[0226] In one embodiment, a dsRNA of the invention is conjugated to a bivalent or trivalent branched linker selected from the group of structures shown in any of formula (XXXI)-(XXXIV):

[chemical structure]

wherein:
q2A, q2B, q3A, q3B, q4A, q4B, q5A, q5B and q5C represent independently for each occurrence 0-20 and wherein the repeating unit can be the same or different;
P^{2A}, P^{2B}, P^{3A}, P^{3B}, P^{4A}, P^{4B}, P^{5A}, P^{5B}, P^{5C}, T^{2A}, T^{2B}, T^{3A}, T^{3B}, T^{4A}, T^{4B}, T^{4A}, T^{5B}, T^{5C} are each independently for each occurrence absent, CO, NH, O, S, OC(O), NHC(O), CH₂, CH₂NH or CH₂O;
Q^{2A}, Q^{2B}, Q^{3A}, Q^{3B}, Q^{4A}, Q^{4B}, Q^{5A}, Q^{5B}, Q^{5C} are independently for each occurrence absent, alkylene, substituted alkylene wherein one or more methylenes can be interrupted or terminated by one or more of O, S, S(O), SO₂, N(R^{N}), C(R′)═C(R″), C≡C or C(O);
R^{2A}, R^{2B}, R^{3A}, R^{3B}, R^{4A}, R^{4B}, R^{5A}, R^{5B}, R^{5C} are each independently for each occurrence absent, NH, O, S, CH₂, C(O)O, C(O)NH, NHCH(R^{a})C(O), —C(O)—CH(R^{a})—NH—, CO, CH═N—O,

[chemical structure]

heterocyclyl;

[0227] L^{2A}, L^{2B}, L^{3A}, L^{3B}, L^{4A}, L^{4B}, L^{5A}, L^{5B} and L^{5C} for each occurrence a monosaccharide (such as GalNAc), disaccharide, trisaccharide, tetrasaccharide, oligosaccharide, or polysaccharide; and R^{a} is H or amino acid side chain. Trivalent conjugating GalNAc derivatives are particularly useful for use with RNAi agents for inhibiting the expression of a target gene, such as those of formula (XXXV):

[chemical structure]

[0228] wherein L^{5A}, L^{5B} and L^{5C} represent a monosaccharide, such as GalNAc derivative.

[0229] Examples of suitable bivalent and trivalent branched linker groups conjugating GalNAc derivatives include, but are not limited to, the structures recited above as formulas II, VII, XI, X, and XIII

[0230] Representative U.S. patents that teach the preparation of RNA conjugates include, but are not limited to, U.S. Pat. Nos. 4,828,979; 4,948,882; 5,218,105; 5,525,465; 5,541,313; 5,545,730; 5,552,538; 5,578,717, 5,580,731; 5,591,584; 5,109,124; 5,118,802; 5,138,045; 5,414,077; 5,486,603; 5,512,439; 5,578,718; 5,608,046; 4,587,044; 4,605,735; 4,667,025; 4,762,779; 4,789,737; 4,824,941; 4,835,263; 4,876,335; 4,904,582; 4,958,013; 5,082,830; 5,112,963; 5,214,136; 5,082,830; 5,112,963; 5,214,136; 5,245,022; 5,254,469; 5,258,506; 5,262,536; 5,272,250; 5,292,873; 5,317,098; 5,371,241, 5,391,723; 5,416,203, 5,451,463; 5,510,475; 5,512,667; 5,514,785; 5,565,552; 5,567,810; 5,574,142; 5,585,481; 5,587,371; 5,595,726; 5,597,696; 5,599,923; 5,599,928 and 5,688,941; 6,294,664; 6,320,017; 6,576,752; 6,783,931; 6,900,297; 7,037,646; 8,106,022, the entire contents of each of which are hereby incorporated herein by reference.

[0231] It is not necessary for all positions in a given compound to be uniformly modified, and in fact more than one of the aforementioned modifications can be incorporated in a single compound or even at a single nucleoside within an iRNA. The present invention also includes iRNA compounds that are chimeric compounds.

[0232] “Chimeric” iRNA compounds or “chimeras,” in the context of this invention, are iRNA compounds, preferably dsRNAs, which contain two or more chemically distinct regions, each made up of at least one monomer unit, i.e., a nucleotide in the case of a dsRNA compound. These iRNAs typically contain at least one region wherein the RNA is modified so as to confer upon the iRNA increased resistance to nuclease degradation, increased cellular uptake, and/or increased binding affinity for the target nucleic acid. An additional region of the iRNA can serve as a substrate for enzymes capable of cleaving RNA:DNA or RNA:RNA hybrids. By way of example, RNase H is a cellular endonuclease which cleaves the RNA strand of an RNA:DNA duplex. Activation of RNase H, therefore, results in cleavage of the RNA target, thereby greatly enhancing the efficiency of iRNA inhibition of gene expression. Consequently, comparable results can often be obtained with shorter iRNAs when chimeric dsRNAs are used, compared to phosphorothioate deoxy dsRNAs hybridizing to the same target region. Cleavage of the RNA target can be routinely detected by gel electrophoresis and, if necessary, associated nucleic acid hybridization techniques known in the art.

[0233] In certain instances, the RNA of an iRNA can be modified by a non-ligand group. A number of non-ligand molecules have been conjugated to iRNAs in order to enhance the activity, cellular distribution or cellular uptake of the iRNA, and procedures for performing such conjugations are available in the scientific literature. Such non-ligand moieties have included lipid moieties, such as cholesterol (Kubo, T. et al., Biochem. Biophys. Res. Comm., 2007, 365(1):54-61; Letsinger et al., (1989) Proc. Natl. Acad. Sci. USA. 86:6553), cholic acid (Manoharan et al., (1994) Bioorg. Med. Chem. Lett. 4:1053), a thioether, e.g., hexyl-S-tritylthiol (Manoharan et al., (1992) Ann. N.Y. Acad. Sci. 660:306; Manoharan et al., Bioorg. Med. Chem. Let., 1993, 3:2765), a thiocholesterol (Oberhauser et al., Nucl. Acids Res., 1992, 20:533), an aliphatic chain, e.g., dodecandiol or undecyl residues (Saison-Behmoaras et al., EMBO J., 1991, 10:111; Kabanov et al., FEBS Lett., 1990, 259:327; Svinarchuk et al., Biochimie, 1993, 75:49), a phospholipid, e.g., di-hexadecyl-rac-glycerol or triethylammonium 1,2-di-O-hexadecyl-rac-glycero-3-H-phosphonate (Manoharan et al., Tetrahedron Lett., 1995, 36:3651; Shea et al., Nucl. Acids Res., 1990, 18:3777), a polyamine or a polyethylene glycol chain (Manoharan et al., Nucleosides & Nucleotides, 1995, 14:969), or adamantane acetic acid (Manoharan et al., Tetrahedron Lett., 1995, 36:3651), a palmityl moiety (Mishra et al., (1995) Biochim. Biophys. Acta. 1264:229), or an octadecylamine or hexylamino-carbonyl-oxycholesterol moiety (Crooke et al., J. Pharmacol. Exp. Ther., 1996, 277:923). Representative United States patents that teach the preparation of such RNA conjugates have been listed above. Typical conjugation protocols involve the synthesis of an RNAs bearing an aminolinker at one or more positions of the sequence. The amino group is then reacted with the molecule being conjugated using appropriate coupling or activating reagents. The conjugation reaction can be performed either with the RNA still bound to the solid support or following cleavage of the RNA, in solution phase. Purification of the RNA conjugate by HPLC typically affords the pure conjugate.

### IV. Delivery of an iRNA of the Invention

[0234] The delivery of an iRNA of the invention to a cell e.g., a cell within a subject, such as a human subject (e.g., a subject in need thereof, such as a subject having a bleeding disorder) can be achieved in a number of different ways. For example, delivery may be performed by contacting a cell with an iRNA of the invention either in vitro or in vivo. In vivo delivery may also be performed directly by administering a composition comprising an iRNA, e.g., a dsRNA, to a subject. Alternatively, in vivo delivery may be performed indirectly by administering one or more vectors that encode and direct the expression of the iRNA. These alternatives are discussed further below.

[0235] In general, any method of delivering a nucleic acid molecule (in vitro or in vivo) can be adapted for use with an iRNA of the invention (see e.g., Akhtar S. and Julian R L. (1992) Trends Cell. Biol. 2(5):139-144 and WO94/02595, which are incorporated herein by reference in their entireties). For in vivo delivery, factors to consider in order to deliver an iRNA molecule include, for example, biological stability of the delivered molecule, prevention of non-specific effects, and accumulation of the delivered molecule in the target tissue. The non-specific effects of an iRNA can be minimized by local administration, for example, by direct injection or implantation into a tissue or topically administering the preparation. Local administration to a treatment site maximizes local concentration of the agent, limits the exposure of the agent to systemic tissues that can otherwise be harmed by the agent or that can degrade the agent, and permits a lower total dose of the iRNA molecule to be administered. Several studies have shown successful knockdown of gene products when an iRNA is administered locally. For example, intraocular delivery of a VEGF dsRNA by intravitreal injection in cynomolgus monkeys (Tolentino, M J., et al., (2004) Retina 24:132-138) and subretinal injections in mice (Reich, S J., et al., (2003) Mol. Vis. 9:210-216) were both shown to prevent neovascularization in an experimental model of age-related macular degeneration. In addition, direct intratumoral injection of a dsRNA in mice reduces tumor volume (Pille, J., et al., (2005) Mol. Ther 0.11:267-274) and can prolong survival of tumor-bearing mice (Kim, W J., et al., (2006) Mol. Ther. 14:343-350; Li, S., et al., (2007) Mol. Ther. 15:515-523). RNA interference has also shown success with local delivery to the CNS by direct injection (Dorn, G., et al., (2004) Nucleic Acids 32:e49; Tan, P H., et al., (2005) Gene Ther. 12:59-66; Makimura, H., et al., (2002) BMC Neurosci. 3:18; Shishkina, G T., et al., (2004) Neuroscience 129:521-528; Thakker, E R., et al., (2004) Proc. Natl. Acad. Sci. U.S.A. 101:17270-17275; Akaneya et al., (2005) J. Neurophysiol. 93:594-602) and to the lungs by intranasal administration (Howard, K A., et al., (2006) Mol. Ther. 14:476-484; Zhang, X., et al., (2004) J. Biol. Chem. 279:10677-10684; Bitko, V., et al., (2005) Nat. Med. 11:50-55). For administering an iRNA systemically for the treatment of a disease, the RNA can be modified or alternatively delivered using a drug delivery system; both methods act to prevent the rapid degradation of the dsRNA by endo- and exo-nucleases in vivo. Modification of the RNA or the pharmaceutical carrier can also permit targeting of the iRNA composition to the target tissue and avoid undesirable off-target effects. iRNA molecules can be modified by chemical conjugation to lipophilic groups such as cholesterol to enhance cellular uptake and prevent degradation. For example, an iRNA directed against ApoB conjugated to a lipophilic cholesterol moiety was injected systemically into mice and resulted in knockdown of apoB mRNA in both the liver and jejunum (Soutschek, J., et al., (2004) Nature 432:173-178). Conjugation of an iRNA to an aptamer has been shown to inhibit tumor growth and mediate tumor regression in a mouse model of prostate cancer (McNamara, J O., et al., (2006) Nat. Biotechnol. 24:1005-1015). In an alternative embodiment, the iRNA can be delivered using drug delivery systems such as a nanoparticle, a dendrimer, a polymer, liposomes, or a cationic delivery system. Positively charged cationic delivery systems facilitate binding of an iRNA molecule (negatively charged) and also enhance interactions at the negatively charged cell membrane to permit efficient uptake of an iRNA by the cell. Cationic lipids, dendrimers, or polymers can either be bound to an iRNA, or induced to form a vesicle or micelle (see e.g., Kim S H., et al., (2008) Journal of Controlled Release 129(2):107-116) that encases an iRNA. The formation of vesicles or micelles further prevents degradation of the iRNA when administered systemically. Methods for making and administering cationic-iRNA complexes are well within the abilities of one skilled in the art (see e.g., Sorensen, D R., et al., (2003) J. Mol. Biol 327:761-766; Verma, U N., et al., (2003) Clin. Cancer Res. 9:1291-1300; Arnold, A S et al., (2007) J. Hypertens. 25:197-205, which are incorporated herein by reference in their entirety). Some non-limiting examples of drug delivery systems useful for systemic delivery of iRNAs include DOTAP (Sorensen, D R., et al., (2003), supra; Verma, U N., et al., (2003), supra), Oligofectamine, “solid nucleic acid lipid particles” (Zimmermann, T S., et al., (2006) Nature 441:111-114), cardiolipin (Chien, P Y., et al., (2005) Cancer Gene Ther. 12:321-328; Pal, A., et al., (2005) Int J. Oncol. 26:1087-1091), polyethyleneimine (Bonnet M E., et al., (2008) Pharm. Res. August 16 Epub ahead of print; Aigner, A. (2006) J Biomed. Biotechnol. 71659), Arg-Gly-Asp (RGD) peptides (Liu, S. (2006) Mol. Pharm. 3:472-487), and polyamidoamines (Tomalia, D A., et al., (2007) Biochem. Soc. Trans. 35:61-67; Yoo, H., et al., (1999) Pharm. Res. 16:1799-1804). In some embodiments, an iRNA forms a complex with cyclodextrin for systemic administration. Methods for administration and pharmaceutical compositions of iRNAs and cyclodextrins can be found in U.S. Pat. No. 7,427,605, which is herein incorporated by reference in its entirety.

[0236] A. Vector Encoded iRNAs of the Invention

[0237] iRNA targeting the Serpinc1 gene can be expressed from transcription units inserted into DNA or RNA vectors (see, e.g., Couture, A, et al., TIG. (1996), 12:5-10; Skillern, A., et al., International PCT Publication No. WO 00/22113, Conrad, International PCT Publication No. WO 00/22114, and Conrad, U.S. Pat. No. 6,054,299). Expression can be transient (on the order of hours to weeks) or sustained (weeks to months or longer), depending upon the specific construct used and the target tissue or cell type. These transgenes can be introduced as a linear construct, a circular plasmid, or a viral vector, which can be an integrating or non-integrating vector. The transgene can also be constructed to permit it to be inherited as an extrachromosomal plasmid (Gassmann, et al., Proc. Natl. Acad. Sci. USA (1995) 92:1292).

[0238] The individual strand or strands of an iRNA can be transcribed from a promoter on an expression vector. Where two separate strands are to be expressed to generate, for example, a dsRNA, two separate expression vectors can be co-introduced (e.g., by transfection or infection) into a target cell. Alternatively, each individual strand of a dsRNA can be transcribed by promoters both of which are located on the same expression plasmid. In one embodiment, a dsRNA is expressed as inverted repeat polynucleotides joined by a linker polynucleotide sequence such that the dsRNA has a stem and loop structure.

[0239] iRNA expression vectors are generally DNA plasmids or viral vectors. Expression vectors compatible with eukaryotic cells, preferably those compatible with vertebrate cells, can be used to produce recombinant constructs for the expression of an iRNA as described herein. Eukaryotic cell expression vectors are well known in the art and are available from a number of commercial sources. Typically, such vectors are provided containing convenient restriction sites for insertion of the desired nucleic acid segment. Delivery of iRNA expressing vectors can be systemic, such as by intravenous or intramuscular administration, by administration to target cells ex-planted from the patient followed by reintroduction into the patient, or by any other means that allows for introduction into a desired target cell.

[0240] iRNA expression plasmids can be transfected into target cells as a complex with cationic lipid carriers (e.g., Oligofectamine) or non-cationic lipid-based carriers (e.g., Transit-TKO™). Multiple lipid transfections for iRNA-mediated knockdowns targeting different regions of a target RNA over a period of a week or more are also contemplated by the invention. Successful introduction of vectors into host cells can be monitored using various known methods. For example, transient transfection can be signaled with a reporter, such as a fluorescent marker, such as Green Fluorescent Protein (GFP). Stable transfection of cells ex vivo can be ensured using markers that provide the transfected cell with resistance to specific environmental factors (e.g., antibiotics and drugs), such as hygromycin B resistance.

[0241] Viral vector systems which can be utilized with the methods and compositions described herein include, but are not limited to, (a) adenovirus vectors; (b) retrovirus vectors, including but not limited to lentiviral vectors, moloney murine leukemia virus, etc.; (c) adeno-associated virus vectors; (d) herpes simplex virus vectors; (e) SV 40 vectors; (f) polyoma virus vectors; (g) papilloma virus vectors; (h) picornavirus vectors; (i) pox virus vectors such as an orthopox, e.g., vaccinia virus vectors or avipox, e.g. canary pox or fowl pox; and (j) a helper-dependent or gutless adenovirus. Replication-defective viruses can also be advantageous. Different vectors will or will not become incorporated into the cells' genome. The constructs can include viral sequences for transfection, if desired. Alternatively, the construct can be incorporated into vectors capable of episomal replication, e.g. EPV and EBV vectors. Constructs for the recombinant expression of an iRNA will generally require regulatory elements, e.g., promoters, enhancers, etc., to ensure the expression of the iRNA in target cells. Other aspects to consider for vectors and constructs are further described below.

[0242] Vectors useful for the delivery of an iRNA will include regulatory elements (promoter, enhancer, etc.) sufficient for expression of the iRNA in the desired target cell or tissue. The regulatory elements can be chosen to provide either constitutive or regulated/inducible expression.

[0243] Expression of the iRNA can be precisely regulated, for example, by using an inducible regulatory sequence that is sensitive to certain physiological regulators, e.g., circulating glucose levels, or hormones (Docherty et al., 1994, FASEB J. 8:20-24). Such inducible expression systems, suitable for the control of dsRNA expression in cells or in mammals include, for example, regulation by ecdysone, by estrogen, progesterone, tetracycline, chemical inducers of dimerization, and isopropyl-beta-D1-thiogalactopyranoside (IPTG). A person skilled in the art would be able to choose the appropriate regulatory/promoter sequence based on the intended use of the iRNA transgene.

[0244] Viral vectors that contain nucleic acid sequences encoding an iRNA can be used. For example, a retroviral vector can be used (see Miller et al., Meth. Enzymol. 217:581-599 (1993)). These retroviral vectors contain the components necessary for the correct packaging of the viral genome and integration into the host cell DNA. The nucleic acid sequences encoding an iRNA are cloned into one or more vectors, which facilitate delivery of the nucleic acid into a patient. More detail about retroviral vectors can be found, for example, in Boesen et al., Biotherapy 6:291-302 (1994), which describes the use of a retroviral vector to deliver the mdr1 gene to hematopoietic stem cells in order to make the stem cells more resistant to chemotherapy. Other references illustrating the use of retroviral vectors in gene therapy are: Clowes et al., J. Clin. Invest. 93:644-651 (1994); Kiem et al., Blood 83:1467-1473 (1994); Salmons and Gunzberg, Human Gene Therapy 4:129-141 (1993); and Grossman and Wilson, Curr. Opin. in Genetics and Devel. 3:110-114 (1993). Lentiviral vectors contemplated for use include, for example, the HIV based vectors described in U.S. Pat. Nos. 6,143,520; 5,665,557; and 5,981,276, which are herein incorporated by reference.

[0245] Adenoviruses are also contemplated for use in delivery of iRNAs of the invention. Adenoviruses are especially attractive vehicles, e.g., for delivering genes to respiratory epithelia. Adenoviruses naturally infect respiratory epithelia where they cause a mild disease. Other targets for adenovirus-based delivery systems are liver, the central nervous system, endothelial cells, and muscle. Adenoviruses have the advantage of being capable of infecting non-dividing cells. Kozarsky and Wilson, Current Opinion in Genetics and Development 3:499-503 (1993) present a review of adenovirus-based gene therapy. Bout et al., Human Gene Therapy 5:3-10 (1994) demonstrated the use of adenovirus vectors to transfer genes to the respiratory epithelia of rhesus monkeys. Other instances of the use of adenoviruses in gene therapy can be found in Rosenfeld et al., Science 252:431-434 (1991); Rosenfeld et al., Cell 68:143-155 (1992); Mastrangeli et al., J. Clin. Invest. 91:225-234 (1993); PCT Publication WO94/12649; and Wang, et al., Gene Therapy 2:775-783 (1995). A suitable AV vector for expressing an iRNA featured in the invention, a method for constructing the recombinant AV vector, and a method for delivering the vector into target cells, are described in Xia H et al., (2002), Nat. Biotech. 20: 1006-1010.

[0246] Adeno-associated virus (AAV) vectors may also be used to delivery an iRNA of the invention (Walsh et al., Proc. Soc. Exp. Biol. Med. 204:289-300 (1993); U.S. Pat. No. 5,436,146). In one embodiment, the iRNA can be expressed as two separate, complementary single-stranded RNA molecules from a recombinant AAV vector having, for example, either the U6 or H1 RNA promoters, or the cytomegalovirus (CMV) promoter. Suitable AAV vectors for expressing the dsRNA featured in the invention, methods for constructing the recombinant AV vector, and methods for delivering the vectors into target cells are described in Samulski R et al., (1987), J. Virol. 61: 3096-3101; Fisher K J et al., (1996), J. Virol, 70: 520-532; Samulski R et al., (1989), J. Virol. 63: 3822-3826; U.S. Pat. Nos. 5,252,479; 5,139,941; International Patent Application No. WO 94/13788; and International Patent Application No. WO 93/24641, the entire disclosures of which are herein incorporated by reference.

[0247] Another viral vector suitable for delivery of an iRNA of the invention is a pox virus such as a vaccinia virus, for example an attenuated vaccinia such as Modified Virus Ankara (MVA) or NYVAC, an avipox such as fowl pox or canary pox.

[0248] The tropism of viral vectors can be modified by pseudotyping the vectors with envelope proteins or other surface antigens from other viruses, or by substituting different viral capsid proteins, as appropriate. For example, lentiviral vectors can be pseudotyped with surface proteins from vesicular stomatitis virus (VSV), rabies, Ebola, Mokola, and the like. AAV vectors can be made to target different cells by engineering the vectors to express different capsid protein serotypes; see, e.g., Rabinowitz J E et al., (2002), J Virol 76:791-801, the entire disclosure of which is herein incorporated by reference.

[0249] The pharmaceutical preparation of a vector can include the vector in an acceptable diluent, or can include a slow release matrix in which the gene delivery vehicle is imbedded. Alternatively, where the complete gene delivery vector can be produced intact from recombinant cells, e.g., retroviral vectors, the pharmaceutical preparation can include one or more cells which produce the gene delivery system.

### V. Pharmaceutical Compositions of the Invention

[0250] The present invention also includes pharmaceutical compositions and formulations which include the iRNAs of the invention. In one embodiment, provided herein are pharmaceutical compositions containing an iRNA, as described herein, and a pharmaceutically acceptable carrier. The pharmaceutical compositions containing the iRNA are useful for treating a disease or disorder associated with the expression or activity of a Serpinc1 gene, e.g. a bleeding disorder. Such pharmaceutical compositions are formulated based on the mode of delivery. One example is compositions that are formulated for systemic administration via parenteral delivery, e.g., by intravenous (IV) delivery. Another example is compositions that are formulated for direct delivery into the brain parenchyma, e.g., by infusion into the brain, such as by continuous pump infusion. The pharmaceutical compositions of the invention may be administered in dosages sufficient to inhibit expression of a Serpinc1 gene. In general, a suitable dose of an iRNA of the invention will be in the range of about 0.001 to about 200.0 milligrams per kilogram body weight of the recipient per day, generally in the range of about 1 to 50 mg per kilogram body weight per day. For example, the dsRNA can be administered at about 0.01 mg/kg, about 0.05 mg/kg, about 0.5 mg/kg, about 1 mg/kg, about 1.5 mg/kg, about 2 mg/kg, about 3 mg/kg, about 10 mg/kg, about 20 mg/kg, about 30 mg/kg, about 40 mg/kg, or about 50 mg/kg per single dose.

[0251] For example, the dsRNA may be administered at a dose of about 0.1, 0.2, 0.3, 0.4, 0.5, 0.6, 0.7, 0.8, 0.9, 1, 1.1, 1.2, 1.3, 1.4, 1.5, 1.6, 1.7, 1.8, 1.9, 2, 2.1, 2.2, 2.3, 2.4, 2.5, 2.6, 2.7, 2.8, 2.9, 3, 3.1, 3.2, 3.3, 3.4, 3.5, 3.6, 3.7, 3.8, 3.9, 4, 4.1, 4.2, 4.3, 4.4, 4.5, 4.6, 4.7, 4.8, 4.9, 5, 5.1, 5.2, 5.3, 5.4, 5.5, 5.6, 5.7, 5.8, 5.9, 6, 6.1, 6.2, 6.3, 6.4, 6.5, 6.6, 6.7, 6.8, 6.9, 7, 7.1, 7.2, 7.3, 7.4, 7.5, 7.6, 7.7, 7.8, 7.9, 8, 8.1, 8.2, 8.3, 8.4, 8.5, 8.6, 8.7, 8.8, 8.9, 9, 9.1, 9.2, 9.3, 9.4, 9.5, 9.6, 9.7, 9.8, 9.9, or about 10 mg/kg. Values and ranges intermediate to the recited values are also intended to be part of this invention.

[0252] In another embodiment, the dsRNA is administered at a dose of about 0.1 to about 50 mg/kg, about 0.25 to about 50 mg/kg, about 0.5 to about 50 mg/kg, about 0.75 to about 50 mg/kg, about 1 to about 50 mg/kg, about 1.5 to about 50 mg/kg, about 2 to about 50 mg/kg, about 2.5 to about 50 mg/kg, about 3 to about 50 mg/kg, about 3.5 to about 50 mg/kg, about 4 to about 50 mg/kg, about 4.5 to about 50 mg/kg, about 5 to about 50 mg/kg, about 7.5 to about 50 mg/kg, about 10 to about 50 mg/kg, about 15 to about 50 mg/kg, about 20 to about 50 mg/kg, about 20 to about 50 mg/kg, about 25 to about 50 mg/kg, about 25 to about 50 mg/kg, about 30 to about 50 mg/kg, about 35 to about 50 mg/kg, about 40 to about 50 mg/kg, about 45 to about 50 mg/kg, about 0.1 to about 45 mg/kg, about 0.25 to about 45 mg/kg, about 0.5 to about 45 mg/kg, about 0.75 to about 45 mg/kg, about 1 to about 45 mg/kg, about 1.5 to about 45 mg/kg, about 2 to about 45 mg/kg, about 2.5 to about 45 mg/kg, about 3 to about 45 mg/kg, about 3.5 to about 45 mg/kg, about 4 to about 45 mg/kg, about 4.5 to about 45 mg/kg, about 5 to about 45 mg/kg, about 7.5 to about 45 mg/kg, about 10 to about 45 mg/kg, about 15 to about 45 mg/kg, about 20 to about 45 mg/kg, about 20 to about 45 mg/kg, about 25 to about 45 mg/kg, about 25 to about 45 mg/kg, about 30 to about 45 mg/kg, about 35 to about 45 mg/kg, about 40 to about 45 mg/kg, about 0.1 to about 40 mg/kg, about 0.25 to about 40 mg/kg, about 0.5 to about 40 mg/kg, about 0.75 to about 40 mg/kg, about 1 to about 40 mg/kg, about 1.5 to about 40 mg/kg, about 2 to about 40 mg/kg, about 2.5 to about 40 mg/kg, about 3 to about 40 mg/kg, about 3.5 to about 40 mg/kg, about 4 to about 40 mg/kg, about 4.5 to about 40 mg/kg, about 5 to about 40 mg/kg, about 7.5 to about 40 mg/kg, about 10 to about 40 mg/kg, about 15 to about 40 mg/kg, about 20 to about 40 mg/kg, about 20 to about 40 mg/kg, about 25 to about 40 mg/kg, about 25 to about 40 mg/kg, about 30 to about 40 mg/kg, about 35 to about 40 mg/kg, about 0.1 to about 30 mg/kg, about 0.25 to about 30 mg/kg, about 0.5 to about 30 mg/kg, about 0.75 to about 30 mg/kg, about 1 to about 30 mg/kg, about 1.5 to about 30 mg/kg, about 2 to about 30 mg/kg, about 2.5 to about 30 mg/kg, about 3 to about 30 mg/kg, about 3.5 to about 30 mg/kg, about 4 to about 30 mg/kg, about 4.5 to about 30 mg/kg, about 5 to about 30 mg/kg, about 7.5 to about 30 mg/kg, about 10 to about 30 mg/kg, about 15 to about 30 mg/kg, about 20 to about 30 mg/kg, about 20 to about 30 mg/kg, about 25 to about 30 mg/kg, about 0.1 to about 20 mg/kg, about 0.25 to about 20 mg/kg, about 0.5 to about 20 mg/kg, about 0.75 to about 20 mg/kg, about 1 to about 20 mg/kg, about 1.5 to about 20 mg/kg, about 2 to about 20 mg/kg, about 2.5 to about 20 mg/kg, about 3 to about 20 mg/kg, about 3.5 to about 20 mg/kg, about 4 to about 20 mg/kg, about 4.5 to about 20 mg/kg, about 5 to about 20 mg/kg, about 7.5 to about 20 mg/kg, about 10 to about 20 mg/kg, or about 15 to about 20 mg/kg. Values and ranges intermediate to the recited values are also intended to be part of this invention.

[0253] For example, the dsRNA may be administered at a dose of about 0.01, 0.02, 0.03, 0.04, 0.05, 0.06, 0.07, 0.08, 0.09, 0.1, 0.2, 0.3, 0.4, 0.5, 0.6, 0.7, 0.8, 0.9, 1, 1.1, 1.2, 1.3, 1.4, 1.5, 1.6, 1.7, 1.8, 1.9, 2, 2.1, 2.2, 2.3, 2.4, 2.5, 2.6, 2.7, 2.8, 2.9, 3, 3.1, 3.2, 3.3, 3.4, 3.5, 3.6, 3.7, 3.8, 3.9, 4, 4.1, 4.2, 4.3, 4.4, 4.5, 4.6, 4.7, 4.8, 4.9, 5, 5.1, 5.2, 5.3, 5.4, 5.5, 5.6, 5.7, 5.8, 5.9, 6, 6.1, 6.2, 6.3, 6.4, 6.5, 6.6, 6.7, 6.8, 6.9, 7, 7.1, 7.2, 7.3, 7.4, 7.5, 7.6, 7.7, 7.8, 7.9, 8, 8.1, 8.2, 8.3, 8.4, 8.5, 8.6, 8.7, 8.8, 8.9, 9, 9.1, 9.2, 9.3, 9.4, 9.5, 9.6, 9.7, 9.8, 9.9, or about 10 mg/kg. Values and ranges intermediate to the recited values are also intended to be part of this invention.

[0254] In another embodiment, the dsRNA is administered at a dose of about 0.5 to about 50 mg/kg, about 0.75 to about 50 mg/kg, about 1 to about 50 mg/kg, about 1.5 to about 50 mg/kg, about 2 to about 50 mg/kg, about 2.5 to about 50 mg/kg, about 3 to about 50 mg/kg, about 3.5 to about 50 mg/kg, about 4 to about 50 mg/kg, about 4.5 to about 50 mg/kg, about 5 to about 50 mg/kg, about 7.5 to about 50 mg/kg, about 10 to about 50 mg/kg, about 15 to about 50 mg/kg, about 20 to about 50 mg/kg, about 20 to about 50 mg/kg, about 25 to about 50 mg/kg, about 25 to about 50 mg/kg, about 30 to about 50 mg/kg, about 35 to about 50 mg/kg, about 40 to about 50 mg/kg, about 45 to about 50 mg/kg, about 0.5 to about 45 mg/kg, about 0.75 to about 45 mg/kg, about 1 to about 45 mg/kg, about 1.5 to about 45 mg/kg, about 2 to about 45 mg/kg, about 2.5 to about 45 mg/kg, about 3 to about 45 mg/kg, about 3.5 to about 45 mg/kg, about 4 to about 45 mg/kg, about 4.5 to about 45 mg/kg, about 5 to about 45 mg/kg, about 7.5 to about 45 mg/kg, about 10 to about 45 mg/kg, about 15 to about 45 mg/kg, about 20 to about 45 mg/kg, about 20 to about 45 mg/kg, about 25 to about 45 mg/kg, about 25 to about 45 mg/kg, about 30 to about 45 mg/kg, about 35 to about 45 mg/kg, about 40 to about 45 mg/kg, about 0.5 to about 40 mg/kg, about 0.75 to about 40 mg/kg, about 1 to about 40 mg/kg, about 1.5 to about 40 mg/kg, about 2 to about 40 mg/kg, about 2.5 to about 40 mg/kg, about 3 to about 40 mg/kg, about 3.5 to about 40 mg/kg, about 4 to about 40 mg/kg, about 4.5 to about 40 mg/kg, about 5 to about 40 mg/kg, about 7.5 to about 40 mg/kg, about 10 to about 40 mg/kg, about 15 to about 40 mg/kg, about 20 to about 40 mg/kg, about 20 to about 40 mg/kg, about 25 to about 40 mg/kg, about 25 to about 40 mg/kg, about 30 to about 40 mg/kg, about 35 to about 40 mg/kg, about 0.5 to about 30 mg/kg, about 0.75 to about 30 mg/kg, about 1 to about 30 mg/kg, about 1.5 to about 30 mg/kg, about 2 to about 30 mg/kg, about 2.5 to about 30 mg/kg, about 3 to about 30 mg/kg, about 3.5 to about 30 mg/kg, about 4 to about 30 mg/kg, about 4.5 to about 30 mg/kg, about 5 to about 30 mg/kg, about 7.5 to about 30 mg/kg, about 10 to about 30 mg/kg, about 15 to about 30 mg/kg, about 20 to about 30 mg/kg, about 20 to about 30 mg/kg, about 25 to about 30 mg/kg, about 0.5 to about 20 mg/kg, about 0.75 to about 20 mg/kg, about 1 to about 20 mg/kg, about 1.5 to about 20 mg/kg, about 2 to about 20 mg/kg, about 2.5 to about 20 mg/kg, about 3 to about 20 mg/kg, about 3.5 to about 20 mg/kg, about 4 to about 20 mg/kg, about 4.5 to about 20 mg/kg, about 5 to about 20 mg/kg, about 7.5 to about 20 mg/kg, about 10 to about 20 mg/kg, or about 15 to about 20 mg/kg. In one embodiment, the dsRNA is administered at a dose of about 10 mg/kg to about 30 mg/kg. Values and ranges intermediate to the recited values are also intended to be part of this invention.

[0255] For example, subjects can be administered a therapeutic amount of iRNA, such as about 0.5, 0.6, 0.7, 0.8, 0.9, 1, 1.1, 1.2, 1.3, 1.4, 1.5, 1.6, 1.7, 1.8, 1.9, 2, 2.1, 2.2, 2.3, 2.4, 2.5, 2.6, 2.7, 2.8, 2.9, 3, 3.1, 3.2, 3.3, 3.4, 3.5, 3.6, 3.7, 3.8, 3.9, 4, 4.1, 4.2, 4.3, 4.4, 4.5, 4.6, 4.7, 4.8, 4.9, 5, 5.1, 5.2, 5.3, 5.4, 5.5, 5.6, 5.7, 5.8, 5.9, 6, 6.1, 6.2, 6.3, 6.4, 6.5, 6.6, 6.7, 6.8, 6.9, 7, 7.1, 7.2, 7.3, 7.4, 7.5, 7.6, 7.7, 7.8, 7.9, 8, 8.1, 8.2, 8.3, 8.4, 8.5, 8.6, 8.7, 8.8, 8.9, 9, 9.1, 9.2, 9.3, 9.4, 9.5, 9.6, 9.7, 9.8, 9.9, 10, 10.5, 11, 11.5, 12, 12.5, 13, 13.5, 14, 14.5, 15, 15.5, 16, 16.5, 17, 17.5, 18, 18.5, 19, 19.5, 20, 20.5, 21, 21.5, 22, 22.5, 23, 23.5, 24, 24.5, 25, 25.5, 26, 26.5, 27, 27.5, 28, 28.5, 29, 29.5, 30, 31, 32, 33, 34, 34, 35, 36, 37, 38, 39, 40, 41, 42, 43, 44, 45, 46, 47, 48, 49, or about 50 mg/kg. Values and ranges intermediate to the recited values are also intended to be part of this invention.

[0256] The pharmaceutical composition can be administered once daily, or the iRNA can be administered as two, three, or more sub-doses at appropriate intervals throughout the day or even using continuous infusion or delivery through a controlled release formulation. In that case, the iRNA contained in each sub-dose must be correspondingly smaller in order to achieve the total daily dosage. The dosage unit can also be compounded for delivery over several days, e.g., using a conventional sustained release formulation which provides sustained release of the iRNA over a period of several days. Sustained release formulations are well known in the art and are particularly useful for delivery of agents at a particular site, such as could be used with the agents of the present invention. In this embodiment, the dosage unit contains a corresponding multiple of the daily dose.

[0257] In other embodiments, a single dose of the pharmaceutical compositions can be long lasting, such that subsequent doses are administered at not more than 3, 4, or 5 day intervals, or at not more than 1, 2, 3, or 4 week intervals. In some embodiments of the invention, a single dose of the pharmaceutical compositions of the invention is administered once per week. In other embodiments of the invention, a single dose of the pharmaceutical compositions of the invention is administered bi-monthly.

[0258] The skilled artisan will appreciate that certain factors can influence the dosage and timing required to effectively treat a subject, including but not limited to the severity of the disease or disorder, previous treatments, the general health and/or age of the subject, and other diseases present. Moreover, treatment of a subject with a therapeutically effective amount of a composition can include a single treatment or a series of treatments. Estimates of effective dosages and in vivo half-lives for the individual iRNAs encompassed by the invention can be made using conventional methodologies or on the basis of in vivo testing using an appropriate animal model, as described elsewhere herein.

[0259] Advances in mouse genetics have generated a number of mouse models for the study of various human diseases, such as a bleeding disorder that would benefit from reduction in the expression of Serpinc1. Such models can be used for in vivo testing of iRNA, as well as for determining a therapeutically effective dose. Suitable mouse models are known in the art and include, for example, Hemophilia A mouse models and Hemohphilia B mouse models, e.g., mice containing a knock-out of a clotting factor gene, such as those described in Bolliger, et al., (2010) Thromb Haemost 103:1233-1238, Bi L, et al., (1995) Nat Genet 10: 119-21, Lin et al., (1997) Blood 90: 3962-6, Kundu et al., (1998) Blood 92: 168-74, Wang et al., (1997) Proc Natl Acad Sci USA 94: 11563-6, and Jin, et al., (2004) Blood 104:1733.

[0260] The pharmaceutical compositions of the present invention can be administered in a number of ways depending upon whether local or systemic treatment is desired and upon the area to be treated. Administration can be topical (e.g., by a transdermal patch), pulmonary, e.g., by inhalation or insufflation of powders or aerosols, including by nebulizer; intratracheal, intranasal, epidermal and transdermal, oral or parenteral. Parenteral administration includes intravenous, intraarterial, subcutaneous, intraperitoneal or intramuscular injection or infusion; subdermal, e.g., via an implanted device; or intracranial, e.g., by intraparenchymal, intrathecal or intraventricular, administration. The iRNA can be delivered in a manner to target a particular tissue, such as the liver (e.g., the hepatocytes of the liver). Pharmaceutical compositions and formulations for topical administration can include transdermal patches, ointments, lotions, creams, gels, drops, suppositories, sprays, liquids and powders. Conventional pharmaceutical carriers, aqueous, powder or oily bases, thickeners and the like can be necessary or desirable. Coated condoms, gloves and the like can also be useful. Suitable topical formulations include those in which the iRNAs featured in the invention are in admixture with a topical delivery agent such as lipids, liposomes, fatty acids, fatty acid esters, steroids, chelating agents and surfactants. Suitable lipids and liposomes include neutral (e.g., dioleoylphosphatidyl DOPE ethanolamine, dimyristoylphosphatidyl choline DMPC, di stearoylphosphatidyl choline) negative (e.g., dimyristoylphosphatidyl glycerol DMPG) and cationic (e.g., dioleoyltetramethylaminopropyl DOTAP and dioleoylphosphatidyl ethanolamine DOTMA). iRNAs featured in the invention can be encapsulated within liposomes or can form complexes thereto, in particular to cationic liposomes. Alternatively, iRNAs can be complexed to lipids, in particular to cationic lipids. Suitable fatty acids and esters include but are not limited to arachidonic acid, oleic acid, eicosanoic acid, lauric acid, caprylic acid, capric acid, myristic acid, palmitic acid, stearic acid, linoleic acid, linolenic acid, dicaprate, tricaprate, monoolein, dilaurin, glyceryl 1-monocaprate, 1-dodecylazacycloheptan-2-one, an acylcarnitine, an acylcholine, or a C₁₋₂₀ alkyl ester (e.g., isopropylmyristate IPM), monoglyceride, diglyceride or pharmaceutically acceptable salt thereof). Topical formulations are described in detail in U.S. Pat. No. 6,747,014, which is incorporated herein by reference.

[0261] A. iRNA Formulations Comprising Membranous Molecular Assemblies

[0262] An iRNA for use in the compositions and methods of the invention can be formulated for delivery in a membranous molecular assembly, e.g., a liposome or a micelle. As used herein, the term “liposome” refers to a vesicle composed of amphiphilic lipids arranged in at least one bilayer, e.g., one bilayer or a plurality of bilayers. Liposomes include unilamellar and multilamellar vesicles that have a membrane formed from a lipophilic material and an aqueous interior. The aqueous portion contains the iRNA composition. The lipophilic material isolates the aqueous interior from an aqueous exterior, which typically does not include the iRNA composition, although in some examples, it may. Liposomes are useful for the transfer and delivery of active ingredients to the site of action. Because the liposomal membrane is structurally similar to biological membranes, when liposomes are applied to a tissue, the liposomal bilayer fuses with bilayer of the cellular membranes. As the merging of the liposome and cell progresses, the internal aqueous contents that include the iRNA are delivered into the cell where the iRNA can specifically bind to a target RNA and can mediate RNAi. In some cases, the liposomes are also specifically targeted, e.g., to direct the iRNA to particular cell types.

[0263] A liposome containing a RNAi agent can be prepared by a variety of methods. In one example, the lipid component of a liposome is dissolved in a detergent so that micelles are formed with the lipid component. For example, the lipid component can be an amphipathic cationic lipid or lipid conjugate. The detergent can have a high critical micelle concentration and may be nonionic. Exemplary detergents include cholate, CHAPS, octylglucoside, deoxycholate, and lauroyl sarcosine. The RNAi agent preparation is then added to the micelles that include the lipid component. The cationic groups on the lipid interact with the RNAi agent and condense around the RNAi agent to form a liposome. After condensation, the detergent is removed, e.g., by dialysis, to yield a liposomal preparation of RNAi agent.

[0264] If necessary a carrier compound that assists in condensation can be added during the condensation reaction, e.g., by controlled addition. For example, the carrier compound can be a polymer other than a nucleic acid (e.g., spermine or spermidine). pH can also be adjusted to favor condensation.

[0265] Methods for producing stable polynucleotide delivery vehicles, which incorporate a polynucleotide/cationic lipid complex as structural components of the delivery vehicle, are further described in, e.g., WO 96/37194, the entire contents of which are incorporated herein by reference. Liposome formation can also include one or more aspects of exemplary methods described in Felgner, P. L. et al., Proc. Natl. Acad. Sci., USA 8:7413-7417, 1987; U.S. Pat. Nos. 4,897,355; 5,171,678; Bangham, et al., M Mol. Biol. 23:238, 1965; Olson, et al., Biochim. Biophys. Acta 557:9, 1979; Szoka, et al., Proc. Natl. Acad. Sci. 75: 4194, 1978; Mayhew, et al., Biochim. Biophys. Acta 775:169, 1984; Kim, et al., Biochim. Biophys. Acta 728:339, 1983; and Fukunaga, et al., Endocrinol. 115:757, 1984. Commonly used techniques for preparing lipid aggregates of appropriate size for use as delivery vehicles include sonication and freeze-thaw plus extrusion (see, e.g., Mayer, et al., Biochim. Biophys. Acta 858:161, 1986). Microfluidization can be used when consistently small (50 to 200 nm) and relatively uniform aggregates are desired (Mayhew, et al., Biochim. Biophys. Acta 775:169, 1984). These methods are readily adapted to packaging RNAi agent preparations into liposomes.

[0266] Liposomes fall into two broad classes. Cationic liposomes are positively charged liposomes which interact with the negatively charged nucleic acid molecules to form a stable complex. The positively charged nucleic acid/liposome complex binds to the negatively charged cell surface and is internalized in an endosome. Due to the acidic pH within the endosome, the liposomes are ruptured, releasing their contents into the cell cytoplasm (Wang et al., Biochem. Biophys. Res. Commun., 1987, 147, 980-985).

[0267] Liposomes which are pH-sensitive or negatively-charged, entrap nucleic acids rather than complex with it. Since both the nucleic acid and the lipid are similarly charged, repulsion rather than complex formation occurs. Nevertheless, some nucleic acid is entrapped within the aqueous interior of these liposomes. pH-sensitive liposomes have been used to deliver nucleic acids encoding the thymidine kinase gene to cell monolayers in culture. Expression of the exogenous gene was detected in the target cells (Zhou et al., Journal of Controlled Release, 1992, 19, 269-274).

[0268] One major type of liposomal composition includes phospholipids other than naturally-derived phosphatidylcholine. Neutral liposome compositions, for example, can be formed from dimyristoyl phosphatidylcholine (DMPC) or dipalmitoyl phosphatidylcholine (DPPC). Anionic liposome compositions generally are formed from dimyristoyl phosphatidylglycerol, while anionic fusogenic liposomes are formed primarily from dioleoyl phosphatidylethanolamine (DOPE). Another type of liposomal composition is formed from phosphatidylcholine (PC) such as, for example, soybean PC, and egg PC. Another type is formed from mixtures of phospholipid and/or phosphatidylcholine and/or cholesterol.

[0269] Examples of other methods to introduce liposomes into cells in vitro and in vivo include U.S. Pat. Nos. 5,283,185; 5,171,678; WO 94/00569; WO 93/24640; WO 91/16024; Felgner, J. Biol. Chem. 269:2550, 1994; Nabel, Proc. Natl. Acad. Sci. 90:11307, 1993; Nabel, Human Gene Ther. 3:649, 1992; Gershon, Biochem. 32:7143, 1993; and Strauss EMBO J. 11:417, 1992.

[0270] Non-ionic liposomal systems have also been examined to determine their utility in the delivery of drugs to the skin, in particular systems comprising non-ionic surfactant and cholesterol. Non-ionic liposomal formulations comprising Novasome™ I (glyceryl dilaurate/cholesterol/polyoxyethylene-10-stearyl ether) and Novasome™ II (glyceryl distearate/cholesterol/polyoxyethylene-10-stearyl ether) were used to deliver cyclosporin-A into the dermis of mouse skin. Results indicated that such non-ionic liposomal systems were effective in facilitating the deposition of cyclosporine A into different layers of the skin (Hu et al., S.T.P. Pharma. Sci., 1994, 4(6) 466).

[0271] Liposomes also include “sterically stabilized” liposomes, a term which, as used herein, refers to liposomes comprising one or more specialized lipids that, when incorporated into liposomes, result in enhanced circulation lifetimes relative to liposomes lacking such specialized lipids. Examples of sterically stabilized liposomes are those in which part of the vesicle-forming lipid portion of the liposome (A) comprises one or more glycolipids, such as monosialoganglioside G_{M1}, or (B) is derivatized with one or more hydrophilic polymers, such as a polyethylene glycol (PEG) moiety. While not wishing to be bound by any particular theory, it is thought in the art that, at least for sterically stabilized liposomes containing gangliosides, sphingomyelin, or PEG-derivatized lipids, the enhanced circulation half-life of these sterically stabilized liposomes derives from a reduced uptake into cells of the reticuloendothelial system (RES) (Allen et al., FEBS Letters, 1987, 223, 42; Wu et al., Cancer Research, 1993, 53, 3765).

[0272] Various liposomes comprising one or more glycolipids are known in the art. Papahadjopoulos et al., (Ann. N.Y. Acad. Sci., 1987, 507, 64) reported the ability of monosialoganglioside G_{M1}, galactocerebroside sulfate and phosphatidylinositol to improve blood half-lives of liposomes. These findings were expounded upon by Gabizon et al., (Proc. Natl. Acad. Sci. U.S.A., 1988, 85, 6949). U.S. Pat. No. 4,837,028 and WO 88/04924, both to Allen et al., disclose liposomes comprising (1) sphingomyelin and (2) the ganglioside G_{M1} or a galactocerebroside sulfate ester. U.S. Pat. No. 5,543,152 (Webb et al.) discloses liposomes comprising sphingomyelin. Liposomes comprising 1,2-sn-dimyristoylphosphatidylcholine are disclosed in WO 97/13499 (Lim et al).

[0273] In one embodiment, cationic liposomes are used. Cationic liposomes possess the advantage of being able to fuse to the cell membrane. Non-cationic liposomes, although not able to fuse as efficiently with the plasma membrane, are taken up by macrophages in vivo and can be used to deliver RNAi agents to macrophages.

[0274] Further advantages of liposomes include: liposomes obtained from natural phospholipids are biocompatible and biodegradable; liposomes can incorporate a wide range of water and lipid soluble drugs; liposomes can protect encapsulated RNAi agents in their internal compartments from metabolism and degradation (Rosoff, in “Pharmaceutical Dosage Forms,” Lieberman, Rieger and Banker (Eds.), 1988, volume 1, p. 245). Important considerations in the preparation of liposome formulations are the lipid surface charge, vesicle size and the aqueous volume of the liposomes.

[0275] A positively charged synthetic cationic lipid, N-[1-(2,3-dioleyloxy)propyl]-N,N,N-trimethylammonium chloride (DOTMA) can be used to form small liposomes that interact spontaneously with nucleic acid to form lipid-nucleic acid complexes which are capable of fusing with the negatively charged lipids of the cell membranes of tissue culture cells, resulting in delivery of RNAi agent (see, e.g., Felgner, P. L. et al., Proc. Natl. Acad. Sci., USA 8:7413-7417, 1987 and U.S. Pat. No. 4,897,355 for a description of DOTMA and its use with DNA).

[0276] A DOTMA analogue, 1,2-bis(oleoyloxy)-3-(trimethylammonia)propane (DOTAP) can be used in combination with a phospholipid to form DNA-complexing vesicles. Lipofectin™ Bethesda Research Laboratories, Gaithersburg, Md.) is an effective agent for the delivery of highly anionic nucleic acids into living tissue culture cells that comprise positively charged DOTMA liposomes which interact spontaneously with negatively charged polynucleotides to form complexes. When enough positively charged liposomes are used, the net charge on the resulting complexes is also positive. Positively charged complexes prepared in this way spontaneously attach to negatively charged cell surfaces, fuse with the plasma membrane, and efficiently deliver functional nucleic acids into, for example, tissue culture cells. Another commercially available cationic lipid, 1,2-bis(oleoyloxy)-3,3-(trimethylammonia)propane (“DOTAP”) (Boehringer Mannheim, Indianapolis, Indiana) differs from DOTMA in that the oleoyl moieties are linked by ester, rather than ether linkages.

[0277] Other reported cationic lipid compounds include those that have been conjugated to a variety of moieties including, for example, carboxyspermine which has been conjugated to one of two types of lipids and includes compounds such as 5-carboxyspermylglycine dioctaoleoylamide (“DOGS”) (Transfectam™, Promega, Madison, Wisconsin) and dipalmitoylphosphatidylethanolamine 5-carboxyspermyl-amide (“DPPES”) (see, e.g., U.S. Pat. No. 5,171,678).

[0278] Another cationic lipid conjugate includes derivatization of the lipid with cholesterol (“DC-Chol”) which has been formulated into liposomes in combination with DOPE (See, Gao, X. and Huang, L., Biochim. Biophys. Res. Commun. 179:280, 1991). Lipopolylysine, made by conjugating polylysine to DOPE, has been reported to be effective for transfection in the presence of serum (Zhou, X. et al., Biochim. Biophys. Acta 1065:8, 1991). For certain cell lines, these liposomes containing conjugated cationic lipids, are said to exhibit lower toxicity and provide more efficient transfection than the DOTMA-containing compositions. Other commercially available cationic lipid products include DMRIE and DMRIE-HP (Vical, La Jolla, California) and Lipofectamine (DOSPA) (Life Technology, Inc., Gaithersburg, Maryland). Other cationic lipids suitable for the delivery of oligonucleotides are described in WO 98/39359 and WO 96/37194.

[0279] Liposomal formulations are particularly suited for topical administration, liposomes present several advantages over other formulations. Such advantages include reduced side effects related to high systemic absorption of the administered drug, increased accumulation of the administered drug at the desired target, and the ability to administer RNAi agent into the skin. In some implementations, liposomes are used for delivering RNAi agent to epidermal cells and also to enhance the penetration of RNAi agent into dermal tissues, e.g., into skin. For example, the liposomes can be applied topically. Topical delivery of drugs formulated as liposomes to the skin has been documented (see, e.g., Weiner et al., Journal of Drug Targeting, 1992, vol. 2,405-410 and du Plessis et al., Antiviral Research, 18, 1992, 259-265; Mannino, R. J. and Fould-Fogerite, S., Biotechniques 6:682-690, 1988; Itani, T. et al., Gene 56:267-276. 1987; Nicolau, C. et al., Meth. Enz. 149:157-176, 1987; Straubinger, R. M. and Papahadjopoulos, D. Meth. Enz. 101:512-527, 1983; Wang, C. Y. and Huang, L., Proc. Natl. Acad. Sci. USA 84:7851-7855, 1987).

[0280] Non-ionic liposomal systems have also been examined to determine their utility in the delivery of drugs to the skin, in particular systems comprising non-ionic surfactant and cholesterol. Non-ionic liposomal formulations comprising Novasome I (glyceryl dilaurate/cholesterol/polyoxyethylene-10-stearyl ether) and Novasome II (glyceryl distearate/cholesterol/polyoxyethylene-10-stearyl ether) were used to deliver a drug into the dermis of mouse skin. Such formulations with RNAi agent are useful for treating a dermatological disorder.

[0281] Liposomes that include iRNA can be made highly deformable. Such deformability can enable the liposomes to penetrate through pore that are smaller than the average radius of the liposome. For example, transfersomes are a type of deformable liposomes. Transferosomes can be made by adding surface edge activators, usually surfactants, to a standard liposomal composition. Transfersomes that include RNAi agent can be delivered, for example, subcutaneously by infection in order to deliver RNAi agent to keratinocytes in the skin. In order to cross intact mammalian skin, lipid vesicles must pass through a series of fine pores, each with a diameter less than 50 nm, under the influence of a suitable transdermal gradient. In addition, due to the lipid properties, these transferosomes can be self-optimizing (adaptive to the shape of pores, e.g., in the skin), self-repairing, and can frequently reach their targets without fragmenting, and often self-loading.

[0282] Other formulations amenable to the present invention are described in U.S. provisional application Ser. No. 61/018,616, filed Jan. 2, 2008; 61/018,611, filed Jan. 2, 2008; 61/039,748, filed Mar. 26, 2008; 61/047,087, filed Apr. 22, 2008 and 61/051,528, filed May 8, 2008. PCT application no PCT/US2007/080331, filed Oct. 3, 2007 also describes formulations that are amenable to the present invention.

[0283] Transfersomes are yet another type of liposomes, and are highly deformable lipid aggregates which are attractive candidates for drug delivery vehicles. Transfersomes can be described as lipid droplets which are so highly deformable that they are easily able to penetrate through pores which are smaller than the droplet. Transfersomes are adaptable to the environment in which they are used, e.g., they are self-optimizing (adaptive to the shape of pores in the skin), self-repairing, frequently reach their targets without fragmenting, and often self-loading. To make transfersomes it is possible to add surface edge-activators, usually surfactants, to a standard liposomal composition. Transfersomes have been used to deliver serum albumin to the skin. The transfersome-mediated delivery of serum albumin has been shown to be as effective as subcutaneous injection of a solution containing serum albumin.

[0284] Surfactants find wide application in formulations such as emulsions (including microemulsions) and liposomes. The most common way of classifying and ranking the properties of the many different types of surfactants, both natural and synthetic, is by the use of the hydrophile/lipophile balance (HLB). The nature of the hydrophilic group (also known as the “head”) provides the most useful means for categorizing the different surfactants used in formulations (Rieger, in Pharmaceutical Dosage Forms, Marcel Dekker, Inc., New York, N.Y., 1988, p. 285).

[0285] If the surfactant molecule is not ionized, it is classified as a nonionic surfactant. Nonionic surfactants find wide application in pharmaceutical and cosmetic products and are usable over a wide range of pH values. In general, their HLB values range from 2 to about 18 depending on their structure. Nonionic surfactants include nonionic esters such as ethylene glycol esters, propylene glycol esters, glyceryl esters, polyglyceryl esters, sorbitan esters, sucrose esters, and ethoxylated esters. Nonionic alkanolamides and ethers such as fatty alcohol ethoxylates, propoxylated alcohols, and ethoxylated/propoxylated block polymers are also included in this class. The polyoxyethylene surfactants are the most popular members of the nonionic surfactant class.

[0286] If the surfactant molecule carries a negative charge when it is dissolved or dispersed in water, the surfactant is classified as anionic. Anionic surfactants include carboxylates such as soaps, acyl lactylates, acyl amides of amino acids, esters of sulfuric acid such as alkyl sulfates and ethoxylated alkyl sulfates, sulfonates such as alkyl benzene sulfonates, acyl isethionates, acyl taurates and sulfosuccinates, and phosphates. The most important members of the anionic surfactant class are the alkyl sulfates and the soaps.

[0287] If the surfactant molecule carries a positive charge when it is dissolved or dispersed in water, the surfactant is classified as cationic. Cationic surfactants include quaternary ammonium salts and ethoxylated amines. The quaternary ammonium salts are the most used members of this class.

[0288] If the surfactant molecule has the ability to carry either a positive or negative charge, the surfactant is classified as amphoteric. Amphoteric surfactants include acrylic acid derivatives, substituted alkylamides, N-alkylbetaines and phosphatides.

[0289] The use of surfactants in drug products, formulations and in emulsions has been reviewed (Rieger, in Pharmaceutical Dosage Forms, Marcel Dekker, Inc., New York, N.Y., 1988, p. 285).

[0290] The iRNA for use in the methods of the invention can also be provided as micellar formulations. “Micelles” are defined herein as a particular type of molecular assembly in which amphipathic molecules are arranged in a spherical structure such that all the hydrophobic portions of the molecules are directed inward, leaving the hydrophilic portions in contact with the surrounding aqueous phase. The converse arrangement exists if the environment is hydrophobic.

[0291] A mixed micellar formulation suitable for delivery through transdermal membranes may be prepared by mixing an aqueous solution of the siRNA composition, an alkali metal C₈ to C₂₂ alkyl sulphate, and a micelle forming compounds. Exemplary micelle forming compounds include lecithin, hyaluronic acid, pharmaceutically acceptable salts of hyaluronic acid, glycolic acid, lactic acid, chamomile extract, cucumber extract, oleic acid, linoleic acid, linolenic acid, monoolein, monooleates, monolaurates, borage oil, evening of primrose oil, menthol, trihydroxy oxo cholanyl glycine and pharmaceutically acceptable salts thereof, glycerin, polyglycerin, lysine, polylysine, triolein, polyoxyethylene ethers and analogues thereof, polidocanol alkyl ethers and analogues thereof, chenodeoxycholate, deoxycholate, and mixtures thereof. The micelle forming compounds may be added at the same time or after addition of the alkali metal alkyl sulphate. Mixed micelles will form with substantially any kind of mixing of the ingredients but vigorous mixing in order to provide smaller size micelles.

[0292] In one method a first micellar composition is prepared which contains the siRNA composition and at least the alkali metal alkyl sulphate. The first micellar composition is then mixed with at least three micelle forming compounds to form a mixed micellar composition. In another method, the micellar composition is prepared by mixing the siRNA composition, the alkali metal alkyl sulphate and at least one of the micelle forming compounds, followed by addition of the remaining micelle forming compounds, with vigorous mixing.

[0293] Phenol and/or m-cresol may be added to the mixed micellar composition to stabilize the formulation and protect against bacterial growth. Alternatively, phenol and/or m-cresol may be added with the micelle forming ingredients. An isotonic agent such as glycerin may also be added after formation of the mixed micellar composition.

[0294] For delivery of the micellar formulation as a spray, the formulation can be put into an aerosol dispenser and the dispenser is charged with a propellant. The propellant, which is under pressure, is in liquid form in the dispenser. The ratios of the ingredients are adjusted so that the aqueous and propellant phases become one, i.e., there is one phase. If there are two phases, it is necessary to shake the dispenser prior to dispensing a portion of the contents, e.g., through a metered valve. The dispensed dose of pharmaceutical agent is propelled from the metered valve in a fine spray.

[0295] Propellants may include hydrogen-containing chlorofluorocarbons, hydrogen-containing fluorocarbons, dimethyl ether and diethyl ether. In certain embodiments, HFA 134a (1,1,1,2 tetrafluoroethane) may be used.

[0296] The specific concentrations of the essential ingredients can be determined by relatively straightforward experimentation. For absorption through the oral cavities, it is often desirable to increase, e.g., at least double or triple, the dosage for through injection or administration through the gastrointestinal tract.

[0297] B. Lipid Particles

[0298] iRNAs, e.g., dsRNAs of in the invention may be fully encapsulated in a lipid formulation, e.g., a LNP, e.g., to form a SPLP, pSPLP, SNALP, or other nucleic acid-lipid particles.

[0299] As used herein, the term “SNALP” refers to a stable nucleic acid-lipid particle, including SPLP. As used herein, the term “SPLP” refers to a nucleic acid-lipid particle comprising plasmid DNA encapsulated within a lipid vesicle. SNALPs and SPLPs typically contain a cationic lipid, a non-cationic lipid, and a lipid that prevents aggregation of the particle (e.g., a PEG-lipid conjugate). SNALPs and SPLPs are extremely useful for systemic applications, as they exhibit extended circulation lifetimes following intravenous (i.v.) injection and accumulate at distal sites (e.g., sites physically separated from the administration site). SPLPs include “pSPLP,” which include an encapsulated condensing agent-nucleic acid complex as set forth in PCT Publication No. WO 00/03683. The particles of the present invention typically have a mean diameter of about 50 nm to about 150 nm, more typically about 60 nm to about 130 nm, more typically about 70 nm to about 110 nm, most typically about 70 nm to about 90 nm, and are substantially nontoxic. In addition, the nucleic acids when present in the nucleic acid-lipid particles of the present invention are resistant in aqueous solution to degradation with a nuclease. Nucleic acid-lipid particles and their method of preparation are disclosed in, e.g., U.S. Pat. Nos. 5,976,567; 5,981,501; 6,534,484; 6,586,410; 6,815,432; U.S. Publication No. 2010/0324120 and PCT Publication No. WO 96/40964.

[0300] In one embodiment, the lipid to drug ratio (mass/mass ratio) (e.g., lipid to dsRNA ratio) will be in the range of from about 1:1 to about 50:1, from about 1:1 to about 25:1, from about 3:1 to about 15:1, from about 4:1 to about 10:1, from about 5:1 to about 9:1, or about 6:1 to about 9:1. Ranges intermediate to the above recited ranges are also contemplated to be part of the invention.

[0301] The cationic lipid can be, for example, N,N-dioleyl-N,N-dimethylammonium chloride (DODAC), N,N-distearyl-N,N-dimethylammonium bromide (DDAB), N—(I-(2,3-dioleoyloxy)propyl)-N,N,N-trimethylammonium chloride (DOTAP), N—(I-(2,3-dioleyloxy)propyl)-N,N,N-trimethylammonium chloride (DOTMA), N,N-dimethyl-2,3-dioleyloxy)propylamine (DODMA), 1,2-DiLinoleyloxy-N,N-dimethylaminopropane (DLinDMA), 1,2-Dilinolenyloxy-N,N-dimethylaminopropane (DLenDMA), 1,2-Dilinoleylcarbamoyloxy-3-dimethylaminopropane (DLin-C-DAP), 1,2-Dilinoleyoxy-3-(dimethylamino)acetoxypropane (DLin-DAC), 1,2-Dilinoleoyl-3-morpholinopropane (DLin-MA), 1,2-Dilinoleoyl-3-dimethylaminopropane (DLinDAP), 1,2-Dilinoleylthio-3-dimethylaminopropane (DLin-S-DMA), 1-Linoleoyl-2-linoleyloxy-3-dimethylaminopropane (DLin-2-DMAP), 1,2-Dilinoleyloxy-3-trimethylaminopropane chloride salt (DLin-TMA.C1), 1,2-Dilinoleoyl-3-trimethylaminopropane chloride salt (DLin-TAP.C1), 1,2-Dilinoleyloxy-3-(N-methylpiperazino)propane (DLin-MPZ), or 3-(N,N-Dilinoleylamino)-1,2-propanediol (DLinAP), 3-(N,N-Dioleylamino)-1,2-propanedio (DOAP), 1,2-Dilinoleyloxo-3-(2-N,N-dimethylamino)ethoxypropane (DLin-EG-DMA), 1,2-Dilinolenyloxy-N,N-dimethylaminopropane (DLinDMA), 2,2-Dilinoleyl-4-dimethylaminomethyl-[1,3]-dioxolane (DLin-K-DMA) or analogs thereof, (3aR,5s,6aS)—N,N-dimethyl-2,2-di((9Z,12Z)-octadeca-9,12-dienyl)tetrahydro-3aH-cyclopenta[d][1,3]dioxol-5-amine (ALN100), (6Z,9Z,28Z,31Z)-heptatriaconta-6,9,28,31-tetraen-19-yl 4-(dimethylamino)butanoate (MC3), 1,1′-(2-(4-(2-((2-(bis(2-hydroxydodecyl)amino)ethyl)(2-hydroxydodecyl)amino)ethyl)piperazin-1-yl)ethylazanediyl)didodecan-2-ol (Tech G1), or a mixture thereof. The cationic lipid can comprise from about 20 mol % to about 50 mol % or about 40 mol % of the total lipid present in the particle.

[0302] In another embodiment, the compound 2,2-Dilinoleyl-4-dimethylaminoethyl-[1,3]-dioxolane can be used to prepare lipid-siRNA nanoparticles. Synthesis of 2,2-Dilinoleyl-4-dimethylaminoethyl-[1,3]-dioxolane is described in U.S. provisional patent application No. 61/107,998 filed on Oct. 23, 2008, which is herein incorporated by reference.

[0303] In one embodiment, the lipid-siRNA particle includes 40% 2, 2-Dilinoleyl-4-dimethylaminoethyl-[1,3]-dioxolane: 10% DSPC: 40% Cholesterol: 10% PEG-C-DOMG (mole percent) with a particle size of 63.0±20 nm and a 0.027 siRNA/Lipid Ratio.

[0304] The ionizable/non-cationic lipid can be an anionic lipid or a neutral lipid including, but not limited to, di stearoylphosphatidylcholine (DSPC), dioleoylphosphatidylcholine (DOPC), dipalmitoylphosphatidylcholine (DPPC), dioleoylphosphatidylglycerol (DOPG), dipalmitoylphosphatidylglycerol (DPPG), dioleoyl-phosphatidylethanolamine (DOPE), palmitoyloleoylphosphatidylcholine (POPC), palmitoyloleoylphosphatidylethanolamine (POPE), dioleoyl-phosphatidylethanolamine 4-(N-maleimidomethyl)-cyclohexane-1-carboxylate (DOPE-mal), dipalmitoyl phosphatidyl ethanolamine (DPPE), dimyristoylphosphoethanolamine (DMPE), distearoyl-phosphatidyl-ethanolamine (DSPE), 16-O-monomethyl PE, 16-O-dimethyl PE, 18-1-trans PE, 1-stearoyl-2-oleoyl-phosphatidylethanolamine (SOPE), cholesterol, or a mixture thereof. The non-cationic lipid can be from about 5 mol % to about 90 mol %, about 10 mol %, or about 58 mol % if cholesterol is included, of the total lipid present in the particle.

[0305] The conjugated lipid that inhibits aggregation of particles can be, for example, a polyethyleneglycol (PEG)-lipid including, without limitation, a PEG-diacylglycerol (DAG), a PEG-dialkyloxypropyl (DAA), a PEG-phospholipid, a PEG-ceramide (Cer), or a mixture thereof. The PEG-DAA conjugate can be, for example, a PEG-dilauryloxypropyl (Ci₂), a PEG-dimyristyloxypropyl (Ci₄), a PEG-dipalmityloxypropyl (Ci₆), or a PEG-distearyloxypropyl (C)₈. The conjugated lipid that prevents aggregation of particles can be from 0 mol % to about 20 mol % or about 2 mol % of the total lipid present in the particle.

[0306] In some embodiments, the nucleic acid-lipid particle further includes cholesterol at, e.g., about 10 mol % to about 60 mol % or about 48 mol % of the total lipid present in the particle. In one embodiment, the lipidoid ND98·4HCl (MW 1487) (see U.S. patent application Ser. No. 12/056,230, filed Mar. 26, 2008, which is incorporated herein by reference), Cholesterol (Sigma-Aldrich), and PEG-Ceramide C16 (Avanti Polar Lipids) can be used to prepare lipid-dsRNA nanoparticles (i.e., LNP01 particles). Stock solutions of each in ethanol can be prepared as follows: ND98, 133 mg/ml; Cholesterol, 25 mg/ml, PEG-Ceramide C16, 100 mg/ml. The ND98, Cholesterol, and PEG-Ceramide C16 stock solutions can then be combined in a, e.g., 42:48:10 molar ratio. The combined lipid solution can be mixed with aqueous dsRNA (e.g., in sodium acetate pH 5) such that the final ethanol concentration is about 35-45% and the final sodium acetate concentration is about 100-300 mM. Lipid-dsRNA nanoparticles typically form spontaneously upon mixing. Depending on the desired particle size distribution, the resultant nanoparticle mixture can be extruded through a polycarbonate membrane (e.g., 100 nm cut-off) using, for example, a thermobarrel extruder, such as Lipex Extruder (Northern Lipids, Inc). In some cases, the extrusion step can be omitted. Ethanol removal and simultaneous buffer exchange can be accomplished by, for example, dialysis or tangential flow filtration. Buffer can be exchanged with, for example, phosphate buffered saline (PBS) at about pH 7, e.g., about pH 6.9, about pH 7.0, about pH 7.1, about pH 7.2, about pH 7.3, or about pH 7.4.

[chemical structure]

[0307] LNP01 formulations are described, e.g., in International Application Publication No. WO 2008/042973, which is hereby incorporated by reference.

[0308] Additional exemplary lipid-dsRNA formulations are described in Table 1.

TABLE 1

| | | cationic lipid/non-cationic |
|---|---|---|
| | | lipid/cholesterol/PEG-lipid conjugate |
| | Ionizable/Cationic Lipid | Lipid:siRNA ratio |
| SNALP-1 | 1,2-Dilinolenyloxy-N,N-dimethylaminopropane | DLinDMA/DPPC/Cholesterol/PEG-cDMA |
| | (DLinDMA) | (57.1/7.1/34.4/1.4) |
| | | lipid:siRNA ~7:1 |
| 2-XTC | 2,2-Dilinoleyl-4-dimethylaminoethyl-[1,3]- | XTC/DPPC/Cholesterol/PEG-cDMA |
| | dioxolane (XTC) | 57.1/7.1/34.4/1.4 |
| | | lipid:siRNA ~7:1 |
| LNP05 | 2,2-Dilinoleyl-4-dimethylaminoethyl-[1,3]- | XTC/DSPC/Cholesterol/PEG-DMG |
| | dioxolane (XTC) | 57.5/7.5/31.5/3.5 |
| | | lipid:siRNA ~6:1 |
| LNP06 | 2,2-Dilinoleyl-4-dimethylaminoethyl-[1,3]- | XTC/DSPC/Cholesterol/PEG-DMG |
| | dioxolane (XTC) | 57.5/7.5/31.5/3.5 |
| | | lipid:siRNA ~11:1 |
| LNP07 | 2,2-Dilinoleyl-4-dimethylaminoethyl-[1,3]- | XTC/DSPC/Cholesterol/PEG-DMG |
| | dioxolane (XTC) | 60/7.5/31/1.5, |
| | | lipid:siRNA ~6:1 |
| LNP08 | 2,2-Dilinoleyl-4-dimethylaminoethyl-[1,3]- | XTC/DSPC/Cholesterol/PEG-DMG |
| | dioxolane (XTC) | 60/7.5/31/1.5, |
| | | lipid:siRNA ~11:1 |
| LNP09 | 2,2-Dilinoleyl-4-dimethylaminoethyl-[1,3]- | XTC/DSPC/Cholesterol/PEG-DMG |
| | dioxolane (XTC) | 50/10/38.5/1.5 |
| | | Lipid:siRNA 10:1 |
| LNP10 | (3aR,5s,6aS)-N,N-dimethyl-2,2-di((9Z,12Z)- | ALN100/DSPC/Cholesterol/PEG-DMG |
| | octadeca-9,12-dienyl)tetrahydro-3aH- | 50/10/38.5/1.5 |
| | cyclopenta[d][1,3]dioxol-5-amine (ALN100) | Lipid:siRNA 10:1 |
| LNP11 | (6Z,9Z,28Z,31Z)-heptatriaconta-6,9,28,31- | MC-3/DSPC/Cholesterol/PEG-DMG |
| | tetraen-19-yl 4-(dimethylamino)butanoate | 50/10/38.5/1.5 |
| | (MC3) | Lipid:siRNA 10:1 |
| LNP12 | 1,1′-(2-(4-(2-((2-(bis(2- | Tech G1/DSPC/Cholesterol/PEG-DMG |
| | hydroxydodecyl)amino)ethyl)(2- | 50/10/38.5/1.5 |
| | hydroxydodecyl)amino)ethyl)piperazin-1- | Lipid:siRNA 10:1 |
| | yl)ethylazanediyl)didodecan-2-ol (Tech G1) | |
| LNP13 | XTC | XTC/DSPC/Chol/PEG-DMG |
| | | 50/10/38.5/1.5 |
| | | Lipid:siRNA: 33:1 |
| LNP14 | MC3 | MC3/DSPC/Chol/PEG-DMG |
| | | 40/15/40/5 |
| | | Lipid:siRNA: 11:1 |
| LNP15 | MC3 | MC3/DSPC/Chol/PEG-DSG/GalNAc-PEG-DSG |
| | | 50/10/35/4.5/0.5 |
| | | Lipid:siRNA: 11:1 |
| LNP16 | MC3 | MC3/DSPC/Chol/PEG-DMG |
| | | 50/10/38.5/1.5 |
| | | Lipid:siRNA: 7:1 |
| LNP17 | MC3 | MC3/DSPC/Chol/PEG-DSG |
| | | 50/10/38.5/1.5 |
| | | Lipid:siRNA: 10:1 |
| LNP18 | MC3 | MC3/DSPC/Chol/PEG-DMG |
| | | 50/10/38.5/1.5 |
| | | Lipid:siRNA: 12:1 |
| LNP19 | MC3 | MC3/DSPC/Chol/PEG-DMG |
| | | 50/10/35/5 |
| | | Lipid:siRNA: 8:1 |
| LNP20 | MC3 | MC3/DSPC/Chol/PEG-DPG |
| | | 50/10/38.5/1.5 |
| | | Lipid:siRNA: 10:1 |
| LNP21 | C12-200 | C12-200/DSPC/Chol/PEG-DSG |
| | | 50/10/38.5/1.5 |
| | | Lipid:siRNA: 7:1 |
| LNP22 | XTC | XTC/DSPC/Chol/PEG-DSG |
| | | 50/10/38.5/1.5 |
| | | Lipid:siRNA: 10:1 |

DSPC: distearoylphosphatidylcholine
DPPC: dipalmitoylphosphatidylcholine
PEG-DMG: PEG-didimyristoyl glycerol (C14-PEG, or PEG-C14) (PEG with avg mol wt of 2000)
PEG-DSG: PEG-distyryl glycerol (C18-PEG, or PEG-C18) (PEG with avg mol wt of 2000)
PEG-cDMA: PEG-carbamoyl-1,2-dimyristyloxypropylamine (PEG with avg mol wt of 2000) SNALP (1,2-Dilinolenyloxy-N,N-dimethylaminopropane (DLinDMA)) comprising formulations are described in International Publication No. WO2009/127060, filed Apr. 15, 2009, which is hereby incorporated by reference.

[0309] XTC comprising formulations are described, e.g., in U.S. Provisional Ser. No. 61/148,366, filed Jan. 29, 2009; U.S. Provisional Ser. No. 61/156,851, filed Mar. 2, 2009; U.S. Provisional Serial No. filed Jun. 10, 2009; U.S. Provisional Ser. No. 61/228,373, filed Jul. 24, 2009; U.S. Provisional Ser. No. 61/239,686, filed Sep. 3, 2009, and International Application No. PCT/US2010/022614, filed Jan. 29, 2010, which are hereby incorporated by reference.

[0310] MC3 comprising formulations are described, e.g., in U.S. Publication No. 2010/0324120, filed Jun. 10, 2010, the entire contents of which are hereby incorporated by reference.

[0311] ALNY-100 comprising formulations are described, e.g., International patent application number PCT/US09/63933, filed on Nov. 10, 2009, which is hereby incorporated by reference.

[0312] C12-200 comprising formulations are described in U.S. Provisional Ser. No. 61/175,770, filed May 5, 2009 and International Application No. PCT/US10/33777, filed May 5, 2010, which are hereby incorporated by reference.

### Synthesis of Ionizable/Cationic Lipids

[0313] Any of the compounds, e.g., cationic lipids and the like, used in the nucleic acid-lipid particles of the invention can be prepared by known organic synthesis techniques, including the methods described in more detail in the Examples. All substituents are as defined below unless indicated otherwise.

[0314] “Alkyl” means a straight chain or branched, noncyclic or cyclic, saturated aliphatic hydrocarbon containing from 1 to 24 carbon atoms. Representative saturated straight chain alkyls include methyl, ethyl, n-propyl, n-butyl, n-pentyl, n-hexyl, and the like; while saturated branched alkyls include isopropyl, sec-butyl, isobutyl, tert-butyl, isopentyl, and the like. Representative saturated cyclic alkyls include cyclopropyl, cyclobutyl, cyclopentyl, cyclohexyl, and the like; while unsaturated cyclic alkyls include cyclopentenyl and cyclohexenyl, and the like.

[0315] “Alkenyl” means an alkyl, as defined above, containing at least one double bond between adjacent carbon atoms. Alkenyls include both cis and trans isomers. Representative straight chain and branched alkenyls include ethylenyl, propylenyl, 1-butenyl, 2-butenyl, isobutylenyl, 1-pentenyl, 2-pentenyl, 3-methyl-1-butenyl, 2-methyl-2-butenyl, 2,3-dimethyl-2-butenyl, and the like.

[0316] “Alkynyl” means any alkyl or alkenyl, as defined above, which additionally contains at least one triple bond between adjacent carbons. Representative straight chain and branched alkynyls include acetylenyl, propynyl, 1-butynyl, 2-butynyl, 1-pentynyl, 2-pentynyl, 3-methyl-1 butynyl, and the like.

[0317] “Acyl” means any alkyl, alkenyl, or alkynyl wherein the carbon at the point of attachment is substituted with an oxo group, as defined below. For example, —C(═O)alkyl, —C(═O)alkenyl, and —C(═O)alkynyl are acyl groups.

[0318] “Heterocycle” means a 5- to 7-membered monocyclic, or 7- to 10-membered bicyclic, heterocyclic ring which is either saturated, unsaturated, or aromatic, and which contains from 1 or 2 heteroatoms independently selected from nitrogen, oxygen and sulfur, and wherein the nitrogen and sulfur heteroatoms can be optionally oxidized, and the nitrogen heteroatom can be optionally quaternized, including bicyclic rings in which any of the above heterocycles are fused to a benzene ring. The heterocycle can be attached via any heteroatom or carbon atom. Heterocycles include heteroaryls as defined below. Heterocycles include morpholinyl, pyrrolidinonyl, pyrrolidinyl, piperidinyl, piperazinyl, hydantoinyl, valerolactamyl, oxiranyl, oxetanyl, tetrahydrofuranyl, tetrahydropyranyl, tetrahydropyridinyl, tetrahydropyrimidinyl, tetrahydrothiophenyl, tetrahydrothiopyranyl, tetrahydropyrimidinyl, tetrahydrothiophenyl, tetrahydrothiopyranyl, and the like.

[0319] The terms “optionally substituted alkyl”, “optionally substituted alkenyl”, “optionally substituted alkynyl”, “optionally substituted acyl”, and “optionally substituted heterocycle” means that, when substituted, at least one hydrogen atom is replaced with a substituent. In the case of an oxo substituent (═O) two hydrogen atoms are replaced. In this regard, substituents include oxo, halogen, heterocycle, —CN, —ORx, —NRxRy, —NRxC(═O)Ry, —NRxSO2Ry, —C(═O)Rx, —C(═O)ORx, —C(═O)NRxRy, —SOnRx and —SOnNRxRy, wherein n is 0, 1 or 2, Rx and Ry are the same or different and independently hydrogen, alkyl or heterocycle, and each of said alkyl and heterocycle substituents can be further substituted with one or more of oxo, halogen, —OH, —CN, alkyl, —ORx, heterocycle, —NRxRy, —NRxC(═O)Ry, —NRxSO2Ry, —C(═O)Rx, —C(═O)ORx, —C(═O)NRxRy, —S OnRx and —SOnNRxRy.

[0320] “Halogen” means fluoro, chloro, bromo and iodo.

[0321] In some embodiments, the methods of the invention can require the use of protecting groups. Protecting group methodology is well known to those skilled in the art (see, for example, Protective Groups in Organic Synthesis, Green, T. W. et al., Wiley-Interscience, New York City, 1999). Briefly, protecting groups within the context of this invention are any group that reduces or eliminates unwanted reactivity of a functional group. A protecting group can be added to a functional group to mask its reactivity during certain reactions and then removed to reveal the original functional group. In some embodiments an “alcohol protecting group” is used. An “alcohol protecting group” is any group which decreases or eliminates unwanted reactivity of an alcohol functional group. Protecting groups can be added and removed using techniques well known in the art.

### Synthesis of Formula A

[0322] In some embodiments, nucleic acid-lipid particles of the invention are formulated using a cationic lipid of formula A:

[chemical structure]

where R1 and R2 are independently alkyl, alkenyl or alkynyl, each can be optionally substituted, and R3 and R4 are independently lower alkyl or R3 and R4 can be taken together to form an optionally substituted heterocyclic ring. In some embodiments, the cationic lipid is XTC (2,2-Dilinoleyl-4-dimethylaminoethyl-[1,3]-dioxolane). In general, the lipid of formula A above can be made by the following Reaction Schemes 1 or 2, wherein all substituents are as defined above unless indicated otherwise.

[chemical structure]

Lipid A, where R1 and R2 are independently alkyl, alkenyl or alkynyl, each can be optionally substituted, and R3 and R4 are independently lower alkyl or R3 and R4 can be taken together to form an optionally substituted heterocyclic ring, can be prepared according to Scheme 1. Ketone 1 and bromide 2 can be purchased or prepared according to methods known to those of ordinary skill in the art. Reaction of 1 and 2 yields ketal 3. Treatment of ketal 3 with amine 4 yields lipids of formula A. The lipids of formula A can be converted to the corresponding ammonium salt with an organic salt of formula 5, where X is anion counter ion selected from halogen, hydroxide, phosphate, sulfate, or the like.

[chemical structure]

[0323] Alternatively, the ketone 1 starting material can be prepared according to Scheme 2. Grignard reagent 6 and cyanide 7 can be purchased or prepared according to methods known to those of ordinary skill in the art. Reaction of 6 and 7 yields ketone 1. Conversion of ketone 1 to the corresponding lipids of formula A is as described in Scheme 1.

### Synthesis of MC3

[0324] Preparation of DLin-M-C₃-DMA (i.e., (6Z,9Z,28Z,31Z)-heptatriaconta-6,9,28,31-tetraen-19-yl 4-(dimethylamino)butanoate) was as follows. A solution of (6Z,9Z,28Z,31Z)-heptatriaconta-6,9,28,31-tetraen-19-ol (0.53 g), 4-N,N-dimethylaminobutyric acid hydrochloride (0.51 g), 4-N,N-dimethylaminopyridine (0.61 g) and 1-ethyl-3-(3-dimethylaminopropyl)carbodiimide hydrochloride (0.53 g) in dichloromethane (5 mL) was stirred at room temperature overnight. The solution was washed with dilute hydrochloric acid followed by dilute aqueous sodium bicarbonate. The organic fractions were dried over anhydrous magnesium sulphate, filtered and the solvent removed on a rotovap. The residue was passed down a silica gel column (20 g) using a 1-5% methanol/dichloromethane elution gradient. Fractions containing the purified product were combined and the solvent removed, yielding a colorless oil (0.54 g). Synthesis of ALNY-100

[0325] Synthesis of ketal 519 [ALNY-100] was performed using the following scheme 3:

[chemical structure]

### Synthesis of 515

[0326] To a stirred suspension of LiAlH4 (3.74 g, 0.09852 mol) in 200 ml anhydrous THF in a two neck RBF (1 L), was added a solution of 514 (10 g, 0.04926 mol) in 70 mL of THF slowly at 0° C. under nitrogen atmosphere. After complete addition, reaction mixture was warmed to room temperature and then heated to reflux for 4 h. Progress of the reaction was monitored by TLC. After completion of reaction (by TLC) the mixture was cooled to 0° C. and quenched with careful addition of saturated Na2SO4 solution. Reaction mixture was stirred for 4 h at room temperature and filtered off. Residue was washed well with THF. The filtrate and washings were mixed and diluted with 400 mL dioxane and 26 mL conc. HCl and stirred for 20 minutes at room temperature. The volatilities were stripped off under vacuum to furnish the hydrochloride salt of 515 as a white solid. Yield: 7.12 g 1H-NMR (DMSO, 400 MHz): δ=9.34 (broad, 2H), 5.68 (s, 2H), 3.74 (m, 1H), 2.66-2.60 (m, 2H), 2.50-2.45 (m, 5H).

### Synthesis of 516

[0327] To a stirred solution of compound 515 in 100 mL dry DCM in a 250 mL two neck RBF, was added NEt3 (37.2 mL, 0.2669 mol) and cooled to 0° C. under nitrogen atmosphere. After a slow addition of N-(benzyloxy-carbonyloxy)-succinimide (20 g, 0.08007 mol) in 50 mL dry DCM, reaction mixture was allowed to warm to room temperature. After completion of the reaction (2-3 h by TLC) mixture was washed successively with 1N HCl solution (1×100 mL) and saturated NaHCO₃ solution (1×50 mL). The organic layer was then dried over anhyd. Na2SO4 and the solvent was evaporated to give crude material which was purified by silica gel column chromatography to get 516 as sticky mass. Yield: 11 g (89%). 1H-NMR (CDCl3, 400 MHz): δ=7.36-7.27 (m, 5H), 5.69 (s, 2H), 5.12 (s, 2H), 4.96 (br., 1H) 2.74 (s, 3H), 2.60 (m, 2H), 2.30-2.25 (m, 2H). LC-MS [M+H]−232.3 (96.94%).

### Synthesis of 517A and 517E

[0328] The cyclopentene 516 (5 g, 0.02164 mol) was dissolved in a solution of 220 mL acetone and water (10:1) in a single neck 500 mL RBF and to it was added N-methyl morpholine-N-oxide (7.6 g, 0.06492 mol) followed by 4.2 mL of 7.6% solution of OsO₄ (0.275 g, 0.00108 mol) in tert-butanol at room temperature. After completion of the reaction (— 3 h), the mixture was quenched with addition of solid Na2SO3 and resulting mixture was stirred for 1.5 h at room temperature. Reaction mixture was diluted with DCM (300 mL) and washed with water (2×100 mL) followed by saturated NaHCO₃(1×50 mL) solution, water (1×30 mL) and finally with brine (1×50 mL). Organic phase was dried over an. Na₂SO₄ and solvent was removed in vacuum. Silica gel column chromatographic purification of the crude material was afforded a mixture of diastereomers, which were separated by prep HPLC. Yield: −6 g crude

[0329] 517A—Peak-1 (white solid), 5.13 g (96%). 1H-NMR (DMSO, 400 MHz): δ=7.39-7.31 (m, 5H), 5.04 (s, 2H), 4.78-4.73 (m, 1H), 4.48-4.47 (d, 2H), 3.94-3.93 (m, 2H), 2.71 (s, 3H), 1.72-1.67 (m, 4H). LC-MS—[M+H]−266.3, [M+NH4+]−283.5 present, HPLC-97.86%. Stereochemistry confirmed by X-ray.

### Synthesis of 518

[0330] Using a procedure analogous to that described for the synthesis of compound 505, compound 518 (1.2 g, 41%) was obtained as a colorless oil. 1H-NMR (CDCl3, 400 MHz): δ=7.35-7.33 (m, 4H), 7.30-7.27 (m, 1H), 5.37-5.27 (m, 8H), 5.12 (s, 2H), 4.75 (m, 1H), 4.58-4.57 (m, 2H), 2.78-2.74 (m, 7H), 2.06-2.00 (m, 8H), 1.96-1.91 (m, 2H), 1.62 (m, 4H), 1.48 (m, 2H), 1.37-1.25 (br m, 36H), 0.87 (m, 6H). HPLC-98.65%.

### General Procedure for the Synthesis of Compound 519

[0331] A solution of compound 518 (1 eq) in hexane (15 mL) was added in a drop-wise fashion to an ice-cold solution of LAH in THF (1 M, 2 eq). After complete addition, the mixture was heated at 40° C. over 0.5 h then cooled again on an ice bath. The mixture was carefully hydrolyzed with saturated aqueous Na2SO4 then filtered through celite and reduced to an oil. Column chromatography provided the pure 519 (1.3 g, 68%) which was obtained as a colorless oil. 13C NMR δ=130.2, 130.1 (×2), 127.9 (×3), 112.3, 79.3, 64.4, 44.7, 38.3, 35.4, 31.5, 29.9 (×2), 29.7, 29.6 (×2), 29.5 (×3), 29.3 (×2), 27.2 (×3), 25.6, 24.5, 23.3, 226, 14.1; Electrospray MS (+ve): Molecular weight for C44H80NO2 (M+H)+ Calc. 654.6, Found 654.6.

[0332] Formulations prepared by either the standard or extrusion-free method can be characterized in similar manners. For example, formulations are typically characterized by visual inspection. They should be whitish translucent solutions free from aggregates or sediment. Particle size and particle size distribution of lipid-nanoparticles can be measured by light scattering using, for example, a Malvern Zetasizer Nano ZS (Malvern, USA). Particles should be about 20-300 nm, such as 40-100 nm in size. The particle size distribution should be unimodal. The total dsRNA concentration in the formulation, as well as the entrapped fraction, is estimated using a dye exclusion assay. A sample of the formulated dsRNA can be incubated with an RNA-binding dye, such as Ribogreen (Molecular Probes) in the presence or absence of a formulation disrupting surfactant, e.g., 0.5% Triton-X100. The total dsRNA in the formulation can be determined by the signal from the sample containing the surfactant, relative to a standard curve. The entrapped fraction is determined by subtracting the “free” dsRNA content (as measured by the signal in the absence of surfactant) from the total dsRNA content. Percent entrapped dsRNA is typically >85%. For SNALP formulation, the particle size is at least 30 nm, at least 40 nm, at least 50 nm, at least 60 nm, at least 70 nm, at least 80 nm, at least 90 nm, at least 100 nm, at least 110 nm, and at least 120 nm. The suitable range is typically about at least 50 nm to about at least 110 nm, about at least 60 nm to about at least 100 nm, or about at least 80 nm to about at least 90 nm.

[0333] Compositions and formulations for oral administration include powders or granules, microparticulates, nanoparticulates, suspensions or solutions in water or non-aqueous media, capsules, gel capsules, sachets, tablets or minitablets. Thickeners, flavoring agents, diluents, emulsifiers, dispersing aids or binders can be desirable. In some embodiments, oral formulations are those in which dsRNAs featured in the invention are administered in conjunction with one or more penetration enhancer surfactants and chelators. Suitable surfactants include fatty acids and/or esters or salts thereof, bile acids and/or salts thereof. Suitable bile acids/salts include chenodeoxycholic acid (CDCA) and ursodeoxychenodeoxycholic acid (UDCA), cholic acid, dehydrocholic acid, deoxycholic acid, glucholic acid, glycholic acid, glycodeoxycholic acid, taurocholic acid, taurodeoxycholic acid, sodium tauro-24,25-dihydro-fusidate and sodium glycodihydrofusidate. Suitable fatty acids include arachidonic acid, undecanoic acid, oleic acid, lauric acid, caprylic acid, capric acid, myristic acid, palmitic acid, stearic acid, linoleic acid, linolenic acid, dicaprate, tricaprate, monoolein, dilaurin, glyceryl 1-monocaprate, 1-dodecylazacycloheptan-2-one, an acylcarnitine, an acylcholine, or a monoglyceride, a diglyceride or a pharmaceutically acceptable salt thereof (e.g., sodium). In some embodiments, combinations of penetration enhancers are used, for example, fatty acids/salts in combination with bile acids/salts. One exemplary combination is the sodium salt of lauric acid, capric acid and UDCA. Further penetration enhancers include polyoxyethylene-9-lauryl ether, polyoxyethylene-20-cetyl ether. DsRNAs featured in the invention can be delivered orally, in granular form including sprayed dried particles, or complexed to form micro or nanoparticles. DsRNA complexing agents include poly-amino acids; polyimines; polyacrylates; polyalkylacrylates, polyoxyethanes, polyalkylcyanoacrylates; cationized gelatins, albumins, starches, acrylates, polyethyleneglycols (PEG) and starches; polyalkylcyanoacrylates; DEAE-derivatized polyimines, Pullulans, celluloses and starches. Suitable complexing agents include chitosan, N-trimethylchitosan, poly-L-lysine, polyhistidine, polyornithine, polyspermines, protamine, polyvinylpyridine, polythiodiethylaminomethylethylene P(TDAE), polyaminostyrene (e.g., p-amino), poly(methylcyanoacrylate), poly(ethylcyanoacrylate), poly(butylcyanoacrylate), poly(isobutylcyanoacrylate), poly(isohexylcyanoacrylate), DEAE-methacrylate, DEAE-hexylacrylate, DEAE-acrylamide, DEAE-albumin and DEAE-dextran, polymethylacrylate, polyhexylacrylate, poly(D,L-lactic acid), poly(DL-lactic-co-glycolic acid (PLGA), alginate, and polyethyleneglycol (PEG). Oral formulations for dsRNAs and their preparation are described in detail in U.S. Pat. No. 6,887,906, US Publn. No. 20030027780, and U.S. Pat. No. 6,747,014, each of which is incorporated herein by reference.

[0334] Compositions and formulations for parenteral, intraparenchymal (into the brain), intrathecal, intraventricular or intrahepatic administration can include sterile aqueous solutions which can also contain buffers, diluents and other suitable additives such as, but not limited to, penetration enhancers, carrier compounds and other pharmaceutically acceptable carriers or excipients.

[0335] Pharmaceutical compositions of the present invention include, but are not limited to, solutions, emulsions, and liposome-containing formulations. These compositions can be generated from a variety of components that include, but are not limited to, preformed liquids, self-emulsifying solids and self-emulsifying semisolids. Particularly preferred are formulations that target the liver when treating hepatic disorders such as hepatic carcinoma.

[0336] The pharmaceutical formulations of the present invention, which can conveniently be presented in unit dosage form, can be prepared according to conventional techniques well known in the pharmaceutical industry. Such techniques include the step of bringing into association the active ingredients with the pharmaceutical carrier(s) or excipient(s). In general, the formulations are prepared by uniformly and intimately bringing into association the active ingredients with liquid carriers or finely divided solid carriers or both, and then, if necessary, shaping the product.

[0337] The compositions of the present invention can be formulated into any of many possible dosage forms such as, but not limited to, tablets, capsules, gel capsules, liquid syrups, soft gels, suppositories, and enemas. The compositions of the present invention can also be formulated as suspensions in aqueous, non-aqueous or mixed media. Aqueous suspensions can further contain substances which increase the viscosity of the suspension including, for example, sodium carboxymethylcellulose, sorbitol and/or dextran. The suspension can also contain stabilizers.

[0338] C. Additional Formulations

[0339] i. Emulsions

[0340] The compositions of the present invention can be prepared and formulated as emulsions. Emulsions are typically heterogeneous systems of one liquid dispersed in another in the form of droplets usually exceeding 0.1 μm in diameter (see e.g., Ansel's Pharmaceutical Dosage Forms and Drug Delivery Systems, Allen, LV., Popovich N G., and Ansel H C., 2004, Lippincott Williams & Wilkins (8th ed.), New York, NY; Idson, in Pharmaceutical Dosage Forms, Lieberman, Rieger and Banker (Eds.), 1988, Marcel Dekker, Inc., New York, N.Y., volume 1, p. 199; Rosoff, in Pharmaceutical Dosage Forms, Lieberman, Rieger and Banker (Eds.), 1988, Marcel Dekker, Inc., New York, N.Y., Volume 1, p. 245; Block in Pharmaceutical Dosage Forms, Lieberman, Rieger and Banker (Eds.), 1988, Marcel Dekker, Inc., New York, N.Y., volume 2, p. 335; Higuchi et al., in Remington's Pharmaceutical Sciences, Mack Publishing Co., Easton, Pa., 1985, p. 301). Emulsions are often biphasic systems comprising two immiscible liquid phases intimately mixed and dispersed with each other. In general, emulsions can be of either the water-in-oil (w/o) or the oil-in-water (o/w) variety. When an aqueous phase is finely divided into and dispersed as minute droplets into a bulk oily phase, the resulting composition is called a water-in-oil (w/o) emulsion. Alternatively, when an oily phase is finely divided into and dispersed as minute droplets into a bulk aqueous phase, the resulting composition is called an oil-in-water (o/w) emulsion. Emulsions can contain additional components in addition to the dispersed phases, and the active drug which can be present as a solution in either the aqueous phase, oily phase or itself as a separate phase. Pharmaceutical excipients such as emulsifiers, stabilizers, dyes, and anti-oxidants can also be present in emulsions as needed. Pharmaceutical emulsions can also be multiple emulsions that are comprised of more than two phases such as, for example, in the case of oil-in-water-in-oil (o/w/o) and water-in-oil-in-water (w/o/w) emulsions. Such complex formulations often provide certain advantages that simple binary emulsions do not. Multiple emulsions in which individual oil droplets of an o/w emulsion enclose small water droplets constitute a w/o/w emulsion. Likewise, a system of oil droplets enclosed in globules of water stabilized in an oily continuous phase provides an o/w/o emulsion.

[0341] Emulsions are characterized by little or no thermodynamic stability. Often, the dispersed or discontinuous phase of the emulsion is well dispersed into the external or continuous phase and maintained in this form through the means of emulsifiers or the viscosity of the formulation. Either of the phases of the emulsion can be a semisolid or a solid, as is the case of emulsion-style ointment bases and creams. Other means of stabilizing emulsions entail the use of emulsifiers that can be incorporated into either phase of the emulsion. Emulsifiers can broadly be classified into four categories: synthetic surfactants, naturally occurring emulsifiers, absorption bases, and finely dispersed solids (see e.g., Ansel's Pharmaceutical Dosage Forms and Drug Delivery Systems, Allen, LV., Popovich N G., and Ansel H C., 2004, Lippincott Williams & Wilkins (8th ed.), New York, NY; Idson, in Pharmaceutical Dosage Forms, Lieberman, Rieger and Banker (Eds.), 1988, Marcel Dekker, Inc., New York, N.Y., volume 1, p. 199).

[0342] Synthetic surfactants, also known as surface active agents, have found wide applicability in the formulation of emulsions and have been reviewed in the literature (see e.g., Ansel's Pharmaceutical Dosage Forms and Drug Delivery Systems, Allen, LV., Popovich N G., and Ansel H C., 2004, Lippincott Williams & Wilkins (8th ed.), New York, NY; Rieger, in Pharmaceutical Dosage Forms, Lieberman, Rieger and Banker (Eds.), 1988, Marcel Dekker, Inc., New York, N.Y., volume 1, p. 285; Idson, in Pharmaceutical Dosage Forms, Lieberman, Rieger and Banker (Eds.), Marcel Dekker, Inc., New York, N.Y., 1988, volume 1, p. 199). Surfactants are typically amphiphilic and comprise a hydrophilic and a hydrophobic portion. The ratio of the hydrophilic to the hydrophobic nature of the surfactant has been termed the hydrophile/lipophile balance (HLB) and is a valuable tool in categorizing and selecting surfactants in the preparation of formulations. Surfactants can be classified into different classes based on the nature of the hydrophilic group: nonionic, anionic, cationic and amphoteric (see e.g., Ansel's Pharmaceutical Dosage Forms and Drug Delivery Systems, Allen, LV., Popovich N G., and Ansel H C., 2004, Lippincott Williams & Wilkins (8th ed.), New York, NY Rieger, in Pharmaceutical Dosage Forms, Lieberman, Rieger and Banker (Eds.), 1988, Marcel Dekker, Inc., New York, N.Y., volume 1, p. 285).

[0343] Naturally occurring emulsifiers used in emulsion formulations include lanolin, beeswax, phosphatides, lecithin and acacia. Absorption bases possess hydrophilic properties such that they can soak up water to form w/o emulsions yet retain their semisolid consistencies, such as anhydrous lanolin and hydrophilic petrolatum. Finely divided solids have also been used as good emulsifiers especially in combination with surfactants and in viscous preparations. These include polar inorganic solids, such as heavy metal hydroxides, nonswelling clays such as bentonite, attapulgite, hectorite, kaolin, montmorillonite, colloidal aluminum silicate and colloidal magnesium aluminum silicate, pigments and nonpolar solids such as carbon or glyceryl tri stearate.

[0344] A large variety of non-emulsifying materials are also included in emulsion formulations and contribute to the properties of emulsions. These include fats, oils, waxes, fatty acids, fatty alcohols, fatty esters, humectants, hydrophilic colloids, preservatives and antioxidants (Block, in Pharmaceutical Dosage Forms, Lieberman, Rieger and Banker (Eds.), 1988, Marcel Dekker, Inc., New York, N.Y., volume 1, p. 335; Idson, in Pharmaceutical Dosage Forms, Lieberman, Rieger and Banker (Eds.), 1988, Marcel Dekker, Inc., New York, N.Y., volume 1, p. 199).

[0345] Hydrophilic colloids or hydrocolloids include naturally occurring gums and synthetic polymers such as polysaccharides (for example, acacia, agar, alginic acid, carrageenan, guar gum, karaya gum, and tragacanth), cellulose derivatives (for example, carboxymethylcellulose and carboxypropylcellulose), and synthetic polymers (for example, carbomers, cellulose ethers, and carboxyvinyl polymers). These disperse or swell in water to form colloidal solutions that stabilize emulsions by forming strong interfacial films around the dispersed-phase droplets and by increasing the viscosity of the external phase.

[0346] Since emulsions often contain a number of ingredients such as carbohydrates, proteins, sterols and phosphatides that can readily support the growth of microbes, these formulations often incorporate preservatives. Commonly used preservatives included in emulsion formulations include methyl paraben, propyl paraben, quaternary ammonium salts, benzalkonium chloride, esters of p-hydroxybenzoic acid, and boric acid. Antioxidants are also commonly added to emulsion formulations to prevent deterioration of the formulation. Antioxidants used can be free radical scavengers such as tocopherols, alkyl gallates, butylated hydroxyanisole, butylated hydroxytoluene, or reducing agents such as ascorbic acid and sodium metabisulfite, and antioxidant synergists such as citric acid, tartaric acid, and lecithin.

[0347] The application of emulsion formulations via dermatological, oral and parenteral routes and methods for their manufacture have been reviewed in the literature (see e.g., Ansel's Pharmaceutical Dosage Forms and Drug Delivery Systems, Allen, LV., Popovich N G., and Ansel H C., 2004, Lippincott Williams & Wilkins (8th ed.), New York, NY; Idson, in Pharmaceutical Dosage Forms, Lieberman, Rieger and Banker (Eds.), 1988, Marcel Dekker, Inc., New York, N.Y., volume 1, p. 199). Emulsion formulations for oral delivery have been very widely used because of ease of formulation, as well as efficacy from an absorption and bioavailability standpoint (see e.g., Ansel's Pharmaceutical Dosage Forms and Drug Delivery Systems, Allen, LV., Popovich N G., and Ansel H C., 2004, Lippincott Williams & Wilkins (8th ed.), New York, NY; Rosoff, in Pharmaceutical Dosage Forms, Lieberman, Rieger and Banker (Eds.), 1988, Marcel Dekker, Inc., New York, N.Y., volume 1, p. 245; Idson, in Pharmaceutical Dosage Forms, Lieberman, Rieger and Banker (Eds.), 1988, Marcel Dekker, Inc., New York, N.Y., volume 1, p. 199). Mineral-oil base laxatives, oil-soluble vitamins and high fat nutritive preparations are among the materials that have commonly been administered orally as o/w emulsions.

[0348] ii. Microemulsions

[0349] In one embodiment of the present invention, the compositions of iRNAs and nucleic acids are formulated as microemulsions. A microemulsion can be defined as a system of water, oil and amphiphile which is a single optically isotropic and thermodynamically stable liquid solution (see e.g., Ansel's Pharmaceutical Dosage Forms and Drug Delivery Systems, Allen, LV., Popovich N G., and Ansel H C., 2004, Lippincott Williams & Wilkins (8th ed.), New York, NY; Rosoff, in Pharmaceutical Dosage Forms, Lieberman, Rieger and Banker (Eds.), 1988, Marcel Dekker, Inc., New York, N.Y., volume 1, p. 245). Typically, microemulsions are systems that are prepared by first dispersing an oil in an aqueous surfactant solution and then adding a sufficient amount of a fourth component, generally an intermediate chain-length alcohol to form a transparent system. Therefore, microemulsions have also been described as thermodynamically stable, isotropically clear dispersions of two immiscible liquids that are stabilized by interfacial films of surface-active molecules (Leung and Shah, in: Controlled Release of Drugs: Polymers and Aggregate Systems, Rosoff, M., Ed., 1989, VCH Publishers, New York, pages 185-215). Microemulsions commonly are prepared via a combination of three to five components that include oil, water, surfactant, cosurfactant and electrolyte. Whether the microemulsion is of the water-in-oil (w/o) or an oil-in-water (o/w) type is dependent on the properties of the oil and surfactant used, and on the structure and geometric packing of the polar heads and hydrocarbon tails of the surfactant molecules (Schott, in Remington's Pharmaceutical Sciences, Mack Publishing Co., Easton, Pa., 1985, p. 271).

[0350] The phenomenological approach utilizing phase diagrams has been extensively studied and has yielded a comprehensive knowledge, to one skilled in the art, of how to formulate microemulsions (see e.g., Ansel's Pharmaceutical Dosage Forms and Drug Delivery Systems, Allen, LV., Popovich N G., and Ansel H C., 2004, Lippincott Williams & Wilkins (8th ed.), New York, NY; Rosoff, in Pharmaceutical Dosage Forms, Lieberman, Rieger and Banker (Eds.), 1988, Marcel Dekker, Inc., New York, N.Y., volume 1, p. 245; Block, in Pharmaceutical Dosage Forms, Lieberman, Rieger and Banker (Eds.), 1988, Marcel Dekker, Inc., New York, N.Y., volume 1, p. 335). Compared to conventional emulsions, microemulsions offer the advantage of solubilizing water-insoluble drugs in a formulation of thermodynamically stable droplets that are formed spontaneously.

[0351] Surfactants used in the preparation of microemulsions include, but are not limited to, ionic surfactants, non-ionic surfactants, Brij 96, polyoxyethylene oleyl ethers, polyglycerol fatty acid esters, tetraglycerol monolaurate (ML310), tetraglycerol monooleate (MO310), hexaglycerol monooleate (PO310), hexaglycerol pentaoleate (PO500), decaglycerol monocaprate (MCA750), decaglycerol monooleate (MO750), decaglycerol sesquioleate (SO750), decaglycerol decaoleate (DAO750), alone or in combination with cosurfactants. The cosurfactant, usually a short-chain alcohol such as ethanol, 1-propanol, and 1-butanol, serves to increase the interfacial fluidity by penetrating into the surfactant film and consequently creating a disordered film because of the void space generated among surfactant molecules. Microemulsions can, however, be prepared without the use of cosurfactants and alcohol-free self-emulsifying microemulsion systems are known in the art. The aqueous phase can typically be, but is not limited to, water, an aqueous solution of the drug, glycerol, PEG300, PEG400, polyglycerols, propylene glycols, and derivatives of ethylene glycol. The oil phase can include, but is not limited to, materials such as Captex 300, Captex 355, Capmul MCM, fatty acid esters, medium chain (C8-C12) mono, di, and tri-glycerides, polyoxyethylated glyceryl fatty acid esters, fatty alcohols, polyglycolized glycerides, saturated polyglycolized C8-C10 glycerides, vegetable oils and silicone oil.

[0352] Microemulsions are particularly of interest from the standpoint of drug solubilization and the enhanced absorption of drugs. Lipid based microemulsions (both o/w and w/o) have been proposed to enhance the oral bioavailability of drugs, including peptides (see e.g., U.S. Pat. Nos. 6,191,105; 7,063,860; 7,070,802; 7,157,099; Constantinides et al., Pharmaceutical Research, 1994, 11, 1385-1390; Ritschel, Meth. Find. Exp. Clin. Pharmacol., 1993, 13, 205). Microemulsions afford advantages of improved drug solubilization, protection of drug from enzymatic hydrolysis, possible enhancement of drug absorption due to surfactant-induced alterations in membrane fluidity and permeability, ease of preparation, ease of oral administration over solid dosage forms, improved clinical potency, and decreased toxicity (see e.g., U.S. Pat. Nos. 6,191,105; 7,063,860; 7,070,802; 7,157,099; Constantinides et al., Pharmaceutical Research, 1994, 11, 1385; Ho et al., J. Pharm. Sci., 1996, 85, 138-143). Often microemulsions can form spontaneously when their components are brought together at ambient temperature. This can be particularly advantageous when formulating thermolabile drugs, peptides or iRNAs. Microemulsions have also been effective in the transdermal delivery of active components in both cosmetic and pharmaceutical applications. It is expected that the microemulsion compositions and formulations of the present invention will facilitate the increased systemic absorption of iRNAs and nucleic acids from the gastrointestinal tract, as well as improve the local cellular uptake of iRNAs and nucleic acids.

[0353] Microemulsions of the present invention can also contain additional components and additives such as sorbitan monostearate (Grill 3), Labrasol, and penetration enhancers to improve the properties of the formulation and to enhance the absorption of the iRNAs and nucleic acids of the present invention. Penetration enhancers used in the microemulsions of the present invention can be classified as belonging to one of five broad categories—surfactants, fatty acids, bile salts, chelating agents, and non-chelating non-surfactants (Lee et al., Critical Reviews in Therapeutic Drug Carrier Systems, 1991, p. 92). Each of these classes has been discussed above.

[0354] iii. Microparticles

[0355] an RNAi agent of the invention may be incorporated into a particle, e.g., a microparticle. Microparticles can be produced by spray-drying, but may also be produced by other methods including lyophilization, evaporation, fluid bed drying, vacuum drying, or a combination of these techniques.

[0356] iv. Penetration Enhancers

[0357] In one embodiment, the present invention employs various penetration enhancers to effect the efficient delivery of nucleic acids, particularly iRNAs, to the skin of animals. Most drugs are present in solution in both ionized and nonionized forms. However, usually only lipid soluble or lipophilic drugs readily cross cell membranes. It has been discovered that even non-lipophilic drugs can cross cell membranes if the membrane to be crossed is treated with a penetration enhancer. In addition to aiding the diffusion of non-lipophilic drugs across cell membranes, penetration enhancers also enhance the permeability of lipophilic drugs.

[0358] Penetration enhancers can be classified as belonging to one of five broad categories, i.e., surfactants, fatty acids, bile salts, chelating agents, and non-chelating non-surfactants (see e.g., Malmsten, M. Surfactants and polymers in drug delivery, Informa Health Care, New York, NY, 2002; Lee et al., Critical Reviews in Therapeutic Drug Carrier Systems, 1991, p. 92). Each of the above-mentioned classes of penetration enhancers are described below in greater detail.

[0359] Surfactants (or “surface-active agents”) are chemical entities which, when dissolved in an aqueous solution, reduce the surface tension of the solution or the interfacial tension between the aqueous solution and another liquid, with the result that absorption of iRNAs through the mucosa is enhanced. In addition to bile salts and fatty acids, these penetration enhancers include, for example, sodium lauryl sulfate, polyoxyethylene-9-lauryl ether and polyoxyethylene-20-cetyl ether) (see e.g., Malmsten, M. Surfactants and polymers in drug delivery, Informa Health Care, New York, NY, 2002; Lee et al., Critical Reviews in Therapeutic Drug Carrier Systems, 1991, p. 92); and perfluorochemical emulsions, such as FC-43. Takahashi et al., J. Pharm. Pharmacol., 1988, 40, 252).

[0360] Various fatty acids and their derivatives which act as penetration enhancers include, for example, oleic acid, lauric acid, capric acid (n-decanoic acid), myristic acid, palmitic acid, stearic acid, linoleic acid, linolenic acid, dicaprate, tricaprate, monoolein (1-monooleoyl-rac-glycerol), dilaurin, caprylic acid, arachidonic acid, glycerol 1-monocaprate, 1-dodecylazacycloheptan-2-one, acylcarnitines, acylcholines, Ci-20 alkyl esters thereof (e.g., methyl, isopropyl and t-butyl), and mono- and di-glycerides thereof (i.e., oleate, laurate, caprate, myristate, palmitate, stearate, linoleate, etc.) (see e.g., Touitou, E., et al., Enhancement in Drug Delivery, CRC Press, Danvers, M A, 2006; Lee et al., Critical Reviews in Therapeutic Drug Carrier Systems, 1991, p. 92; Muranishi, Critical Reviews in Therapeutic Drug Carrier Systems, 1990, 7, 1-33; El Hariri et al., J. Pharm. Pharmacol., 1992, 44, 651-654).

[0361] The physiological role of bile includes the facilitation of dispersion and absorption of lipids and fat-soluble vitamins (see e.g., Malmsten, M. Surfactants and polymers in drug delivery, Informa Health Care, New York, NY, 2002; Brunton, Chapter 38 in: Goodman & Gilman's The Pharmacological Basis of Therapeutics, 9th Ed., Hardman et al., Eds., McGraw-Hill, New York, 1996, pp. 934-935). Various natural bile salts, and their synthetic derivatives, act as penetration enhancers. Thus, the term “bile salts” includes any of the naturally occurring components of bile as well as any of their synthetic derivatives. Suitable bile salts include, for example, cholic acid (or its pharmaceutically acceptable sodium salt, sodium cholate), dehydrocholic acid (sodium dehydrocholate), deoxycholic acid (sodium deoxycholate), glucholic acid (sodium glucholate), glycholic acid (sodium glycocholate), glycodeoxycholic acid (sodium glycodeoxycholate), taurocholic acid (sodium taurocholate), taurodeoxycholic acid (sodium taurodeoxycholate), chenodeoxycholic acid (sodium chenodeoxycholate), ursodeoxycholic acid (UDCA), sodium tauro-24,25-dihydro-fusidate (STDHF), sodium glycodihydrofusidate and polyoxyethylene-9-lauryl ether (POE) (see e.g., Malmsten, M. Surfactants and polymers in drug delivery, Informa Health Care, New York, NY, 2002; Lee et al., Critical Reviews in Therapeutic Drug Carrier Systems, 1991, page 92; Swinyard, Chapter 39 In: Remington's Pharmaceutical Sciences, 18th Ed., Gennaro, ed., Mack Publishing Co., Easton, Pa., 1990, pages 782-783; Muranishi, Critical Reviews in Therapeutic Drug Carrier Systems, 1990, 7, 1-33; Yamamoto et al., J. Pharm. Exp. Ther., 1992, 263, 25; Yamashita et al., J. Pharm. Sci., 1990, 79, 579-583).

[0362] Chelating agents, as used in connection with the present invention, can be defined as compounds that remove metallic ions from solution by forming complexes therewith, with the result that absorption of iRNAs through the mucosa is enhanced. With regards to their use as penetration enhancers in the present invention, chelating agents have the added advantage of also serving as DNase inhibitors, as most characterized DNA nucleases require a divalent metal ion for catalysis and are thus inhibited by chelating agents (Jarrett, J. Chromatogr., 1993, 618, 315-339). Suitable chelating agents include but are not limited to disodium ethylenediaminetetraacetate (EDTA), citric acid, salicylates (e.g., sodium salicylate, 5-methoxysalicylate and homovanillate), N-acyl derivatives of collagen, laureth-9 and N-amino acyl derivatives of beta-diketones (enamines)(see e.g., Katdare, A. et al., Excipient development for pharmaceutical, biotechnology, and drug delivery, CRC Press, Danvers, M A, 2006; Lee et al., Critical Reviews in Therapeutic Drug Carrier Systems, 1991, page 92; Muranishi, Critical Reviews in Therapeutic Drug Carrier Systems, 1990, 7, 1-33; Buur et al., J. Control Rel., 1990, 14, 43-51).

[0363] As used herein, non-chelating non-surfactant penetration enhancing compounds can be defined as compounds that demonstrate insignificant activity as chelating agents or as surfactants but that nonetheless enhance absorption of iRNAs through the alimentary mucosa (see e.g., Muranishi, Critical Reviews in Therapeutic Drug Carrier Systems, 1990, 7, 1-33). This class of penetration enhancers includes, for example, unsaturated cyclic ureas, 1-alkyl- and 1-alkenylazacyclo-alkanone derivatives (Lee et al., Critical Reviews in Therapeutic Drug Carrier Systems, 1991, page 92); and non-steroidal anti-inflammatory agents such as diclofenac sodium, indomethacin and phenylbutazone (Yamashita et al., J. Pharm. Pharmacol., 1987, 39, 621-626).

[0364] Agents that enhance uptake of iRNAs at the cellular level can also be added to the pharmaceutical and other compositions of the present invention. For example, cationic lipids, such as lipofectin (Junichi et al, U.S. Pat. No. 5,705,188), cationic glycerol derivatives, and polycationic molecules, such as polylysine (Lollo et al., PCT Application WO 97/30731), are also known to enhance the cellular uptake of dsRNAs. Examples of commercially available transfection reagents include, for example Lipofectamine™ (Invitrogen; Carlsbad, CA), Lipofectamine 2000™ (Invitrogen; Carlsbad, CA), 293Fectin™ (Invitrogen; Carlsbad, CA), Cellfectin™ (Invitrogen; Carlsbad, CA), DIVIRIE-C™ (Invitrogen; Carlsbad, CA), FreeStyle™ MAX (Invitrogen; Carlsbad, CA), Lipofectamine™ 2000 CD (Invitrogen; Carlsbad, CA), Lipofectamine™ (Invitrogen; Carlsbad, CA), RNAiMAX (Invitrogen; Carlsbad, CA), Oligofectamine™ (Invitrogen; Carlsbad, CA), Optifect™ (Invitrogen; Carlsbad, CA), X-tremeGENE Q2 Transfection Reagent (Roche; Grenzacherstrasse, Switzerland), DOTAP Liposomal Transfection Reagent (Grenzacherstrasse, Switzerland), DOSPER Liposomal Transfection Reagent (Grenzacherstrasse, Switzerland), or Fugene (Grenzacherstrasse, Switzerland), Transfectam® Reagent (Promega; Madison, WI), TransFast™ Transfection Reagent (Promega; Madison, WI), Tfx™-20 Reagent (Promega; Madison, WI), Tfx™-50 Reagent (Promega; Madison, WI), DreamFect™ (OZ Biosciences; Marseille, France), EcoTransfect (OZ Biosciences; Marseille, France), TransPass^{a} D1 Transfection Reagent (New England Biolabs; Ipswich, MA, USA), LyoVec™/LipoGen™ (Invitrogen; San Diego, CA, USA), PerFectin Transfection Reagent (Genlantis; San Diego, CA, USA), NeuroPORTER Transfection Reagent (Genlantis; San Diego, CA, USA), GenePORTER Transfection reagent (Genlantis; San Diego, CA, USA), GenePORTER 2 Transfection reagent (Genlantis; San Diego, CA, USA), Cytofectin Transfection Reagent (Genlantis; San Diego, CA, USA), BaculoPORTER Transfection Reagent (Genlantis; San Diego, CA, USA), TrojanPORTER™ transfection Reagent (Genlantis; San Diego, CA, USA), RiboFect (Bioline; Taunton, MA, USA), PlasFect (Bioline; Taunton, MA, USA), UniFECTOR (B-Bridge International; Mountain View, CA, USA), SureFECTOR (B-Bridge International; Mountain View, CA, USA), or HiFect™ (B-Bridge International, Mountain View, CA, USA), among others.

[0365] Other agents can be utilized to enhance the penetration of the administered nucleic acids, including glycols such as ethylene glycol and propylene glycol, pyrrols such as 2-pyrrol, azones, and terpenes such as limonene and menthone.

[0366] v. Carriers

[0367] Certain compositions of the present invention also incorporate carrier compounds in the formulation. As used herein, “carrier compound” or “carrier” can refer to a nucleic acid, or analog thereof, which is inert (i.e., does not possess biological activity per se) but is recognized as a nucleic acid by in vivo processes that reduce the bioavailability of a nucleic acid having biological activity by, for example, degrading the biologically active nucleic acid or promoting its removal from circulation. The coadministration of a nucleic acid and a carrier compound, typically with an excess of the latter substance, can result in a substantial reduction of the amount of nucleic acid recovered in the liver, kidney or other extracirculatory reservoirs, presumably due to competition between the carrier compound and the nucleic acid for a common receptor. For example, the recovery of a partially phosphorothioate dsRNA in hepatic tissue can be reduced when it is coadministered with polyinosinic acid, dextran sulfate, polycytidylic acid or 4-acetamido-4′isothiocyano-stilbene-2,2′-disulfonic acid (Miyao et al., DsRNA Res. Dev., 1995, 5, 115-121; Takakura et al., DsRNA & Nucl. Acid Drug Dev., 1996, 6, 177-183.

[0368] vi. Excipients

[0369] In contrast to a carrier compound, a “pharmaceutical carrier” or “excipient” is a pharmaceutically acceptable solvent, suspending agent or any other pharmacologically inert vehicle for delivering one or more nucleic acids to an animal. The excipient can be liquid or solid and is selected, with the planned manner of administration in mind, so as to provide for the desired bulk, consistency, etc., when combined with a nucleic acid and the other components of a given pharmaceutical composition. Typical pharmaceutical carriers include, but are not limited to, binding agents (e.g., pregelatinized maize starch, polyvinylpyrrolidone or hydroxypropyl methylcellulose, etc.); fillers (e.g., lactose and other sugars, microcrystalline cellulose, pectin, gelatin, calcium sulfate, ethyl cellulose, polyacrylates or calcium hydrogen phosphate, etc.); lubricants (e.g., magnesium stearate, talc, silica, colloidal silicon dioxide, stearic acid, metallic stearates, hydrogenated vegetable oils, corn starch, polyethylene glycols, sodium benzoate, sodium acetate, etc.); disintegrants (e.g., starch, sodium starch glycolate, etc.); and wetting agents (e.g., sodium lauryl sulphate, etc).

[0370] Pharmaceutically acceptable organic or inorganic excipients suitable for non-parenteral administration which do not deleteriously react with nucleic acids can also be used to formulate the compositions of the present invention. Suitable pharmaceutically acceptable carriers include, but are not limited to, water, salt solutions, alcohols, polyethylene glycols, gelatin, lactose, amylose, magnesium stearate, talc, silicic acid, viscous paraffin, hydroxymethylcellulose, polyvinylpyrrolidone and the like.

[0371] Formulations for topical administration of nucleic acids can include sterile and non-sterile aqueous solutions, non-aqueous solutions in common solvents such as alcohols, or solutions of the nucleic acids in liquid or solid oil bases. The solutions can also contain buffers, diluents and other suitable additives. Pharmaceutically acceptable organic or inorganic excipients suitable for non-parenteral administration which do not deleteriously react with nucleic acids can be used.

[0372] Suitable pharmaceutically acceptable excipients include, but are not limited to, water, salt solutions, alcohol, polyethylene glycols, gelatin, lactose, amylose, magnesium stearate, talc, silicic acid, viscous paraffin, hydroxymethylcellulose, polyvinylpyrrolidone and the like.

[0373] vii. Other Components

[0374] The compositions of the present invention can additionally contain other adjunct components conventionally found in pharmaceutical compositions, at their art-established usage levels. Thus, for example, the compositions can contain additional, compatible, pharmaceutically-active materials such as, for example, antipruritics, astringents, local anesthetics or anti-inflammatory agents, or can contain additional materials useful in physically formulating various dosage forms of the compositions of the present invention, such as dyes, flavoring agents, preservatives, antioxidants, opacifiers, thickening agents and stabilizers. However, such materials, when added, should not unduly interfere with the biological activities of the components of the compositions of the present invention. The formulations can be sterilized and, if desired, mixed with auxiliary agents, e.g., lubricants, preservatives, stabilizers, wetting agents, emulsifiers, salts for influencing osmotic pressure, buffers, colorings, flavorings and/or aromatic substances and the like which do not deleteriously interact with the nucleic acid(s) of the formulation.

[0375] Aqueous suspensions can contain substances which increase the viscosity of the suspension including, for example, sodium carboxymethylcellulose, sorbitol and/or dextran. The suspension can also contain stabilizers.

[0376] In some embodiments, pharmaceutical compositions featured in the invention include (a) one or more iRNA compounds and (b) one or more agents which function by a non-RNAi mechanism and which are useful in treating a bleeding disorder. Examples of such agents include, but are not limited to an anti-inflammatory agent, anti-steatosis agent, anti-viral, and/or anti-fibrosis agent. In addition, other substances commonly used to protect the liver, such as silymarin, can also be used in conjunction with the iRNAs described herein. Other agents useful for treating liver diseases include telbivudine, entecavir, and protease inhibitors such as telaprevir and other disclosed, for example, in Tung et al., U.S. Application Publication Nos. 2005/0148548, 2004/0167116, and 2003/0144217; and in Hale et al., U.S. Application Publication No. 2004/0127488.

[0377] Toxicity and therapeutic efficacy of such compounds can be determined by standard pharmaceutical procedures in cell cultures or experimental animals, e.g., for determining the LD50 (the dose lethal to 50% of the population) and the ED50 (the dose therapeutically effective in 50% of the population). The dose ratio between toxic and therapeutic effects is the therapeutic index and it can be expressed as the ratio LD50/ED50. Compounds that exhibit high therapeutic indices are preferred.

[0378] The data obtained from cell culture assays and animal studies can be used in formulating a range of dosage for use in humans. The dosage of compositions featured herein in the invention lies generally within a range of circulating concentrations that include the ED50 with little or no toxicity. The dosage can vary within this range depending upon the dosage form employed and the route of administration utilized. For any compound used in the methods featured in the invention, the therapeutically effective dose can be estimated initially from cell culture assays. A dose can be formulated in animal models to achieve a circulating plasma concentration range of the compound or, when appropriate, of the polypeptide product of a target sequence (e.g., achieving a decreased concentration of the polypeptide) that includes the IC50 (i.e., the concentration of the test compound which achieves a half-maximal inhibition of symptoms) as determined in cell culture. Such information can be used to more accurately determine useful doses in humans. Levels in plasma can be measured, for example, by high performance liquid chromatography.

[0379] In addition to their administration, as discussed above, the iRNAs featured in the invention can be administered in combination with other known agents effective in treatment of pathological processes mediated by Serpinc1 expression. In any event, the administering physician can adjust the amount and timing of iRNA administration on the basis of results observed using standard measures of efficacy known in the art or described herein.

### VI. Methods of the Invention

[0380] The present invention also provides methods of using an iRNA of the invention and/or a composition containing an iRNA of the invention to reduce and/or inhibit Serpinc1 expression in a cell. In other aspects, the present invention provides an iRNA of the invention and/or a composition comprising an iRNA of the invention for use in reducing and/or inhibiting Serpinc1 expression in a cell. In yet other aspects, use of an iRNA of the invention and/or a composition comprising an iRNA of the invention for the manufacture of a medicament for reducing and/or inhibiting Serpinc1 expression in a cell are provided.

[0381] The methods and uses include contacting the cell with an iRNA, e.g., a dsRNA, of the invention and maintaining the cell for a time sufficient to obtain degradation of the mRNA transcript of a Serpinc1 gene, thereby inhibiting expression of the Serpinc1 gene in the cell.

[0382] Reduction in gene expression can be assessed by any methods known in the art. For example, a reduction in the expression of Serpinc1 may be determined by determining the mRNA expression level of Serpinc1 using methods routine to one of ordinary skill in the art, e.g., Northern blotting, qRT-PCR, by determining the protein level of Serpinc1 using methods routine to one of ordinary skill in the art, such as Western blotting, immunological techniques, and/or by determining a biological activity of Serpinc1, such as affecting one or more molecules associated with the cellular blood clotting mechanism (or in an in vivo setting, blood clotting itself).

[0383] In the methods and uses of the invention the cell may be contacted in vitro or in vivo, i.e., the cell may be within a subject.

[0384] A cell suitable for treatment using the methods of the invention may be any cell that expresses a Serpinc1 gene. A cell suitable for use in the methods and uses of the invention may be a mammalian cell, e.g., a primate cell (such as a human cell or a non-human primate cell, e.g., a monkey cell or a chimpanzee cell), a non-primate cell (such as a cow cell, a pig cell, a camel cell, a llama cell, a horse cell, a goat cell, a rabbit cell, a sheep cell, a hamster, a guinea pig cell, a cat cell, a dog cell, a rat cell, a mouse cell, a lion cell, a tiger cell, a bear cell, or a buffalo cell), a bird cell (e.g., a duck cell or a goose cell), or a whale cell. In one embodiment, the cell is a human cell, e.g., a human liver cell.

[0385] Serpinc1 expression may be inhibited in the cell by at least about 5, 6, 7, 8, 9, 10, 11, 12, 13, 14, 15, 16, 17, 18, 19, 20, and 21, 22, 23, 24, 25, 26, 27, 28, 29, 30, 31, 32, 33, 34, 35, 36, 37, 38, 39, 40, 41, 42, 43, 45, 46, 47, 48, 49, 50, 51, 52, 53, 54, 55, 56, 57, 58, 59, 60, 61, 62, 63, 64, 65, 66, 67, 68, 69, 70, 71, 72, 73, 74, 75, 76, 77, 78, 79, 80, 81, 82, 83, 84, 85, 86, 87, 88, 89, 90, 91, 92, 93, 94, 95, 96, 97, 98, 99, or about 100%.

[0386] The in vivo methods and uses of the invention may include administering to a subject a composition containing an iRNA, where the iRNA includes a nucleotide sequence that is complementary to at least a part of an RNA transcript of the Serpinc1 gene of the mammal to be treated. When the organism to be treated is a mammal such as a human, the composition can be administered by any means known in the art including, but not limited to oral, intraperitoneal, or parenteral routes, including intracranial (e.g., intraventricular, intraparenchymal and intrathecal), intravenous, intramuscular, subcutaneous, transdermal, airway (aerosol), nasal, rectal, and topical (including buccal and sublingual) administration. In certain embodiments, the compositions are administered by intravenous infusion or injection.

[0387] In some embodiments, the administration is via a depot injection. A depot injection may release the iRNA in a consistent way over a prolonged time period. Thus, a depot injection may reduce the frequency of dosing needed to obtain a desired effect, e.g., a desired inhibition of Serpinc1, or a therapeutic or prophylactic effect. A depot injection may also provide more consistent serum concentrations. Depot injections may include subcutaneous injections or intramuscular injections. In preferred embodiments, the depot injection is a subcutaneous injection.

[0388] In some embodiments, the administration is via a pump. The pump may be an external pump or a surgically implanted pump. In certain embodiments, the pump is a subcutaneously implanted osmotic pump. In other embodiments, the pump is an infusion pump. An infusion pump may be used for intravenous, subcutaneous, arterial, or epidural infusions. In preferred embodiments, the infusion pump is a subcutaneous infusion pump. In other embodiments, the pump is a surgically implanted pump that delivers the iRNA to the liver.

[0389] The mode of administration may be chosen based upon whether local or systemic treatment is desired and based upon the area to be treated. The route and site of administration may be chosen to enhance targeting.

[0390] In one aspect, the present invention also provides methods for inhibiting the expression of a Serpinc1 gene in a mammal, e.g., a human. The present invention also provides a composition comprising an iRNA, e.g., a dsRNA, that targets a Serpinc1 gene in a cell of a mammal for use in inhibiting expression of the Serpinc1 gene in the mammal. In another aspect, the present invention provides use of an iRNA, e.g., a dsRNA, that targets a Serpinc1 gene in a cell of a mammal in the manufacture of a medicament for inhibiting expression of the Serpinc1 gene in the mammal.

[0391] The methods and uses include administering to the mammal, e.g., a human, a composition comprising an iRNA, e.g., a dsRNA, that targets a Serpinc1 gene in a cell of the mammal and maintaining the mammal for a time sufficient to obtain degradation of the mRNA transcript of the Serpinc1 gene, thereby inhibiting expression of the Serpinc1 gene in the mammal.

[0392] Reduction in gene expression can be assessed by any methods known it the art and by methods, e.g. qRT-PCR, described herein. Reduction in protein production can be assessed by any methods known it the art and by methods, e.g. ELISA, described herein. In one embodiment, a puncture liver biopsy sample serves as the tissue material for monitoring the reduction in Serpinc1 gene and/or protein expression. In another embodiment, a blood sample serves as the tissue material for monitoring the reduction in Serpinc1 gene and/or protein expression. In other embodiments, inhibition of the expression of a Serpinc1 gene is monitored indirectly by, for example, determining the expression and/or activity of a gene in a Serpinc1 pathway (see, e.g., FIG. 1). For example, the activity of factor Xa may be monitored to determine the inhibition of expression of a Serpinc1 gene. Antithrombin levels, clot formation, and/or endogenous thrombin potential, in a sample, e.g., a blood or liver sample, may also be measured. Suitable assays are further described in the Examples section below.

[0393] The present invention further provides methods of treating a subject having a disorder that would benefit from reduction in Serpinc1 expression, e.g., hemophilia. The treatment methods (and uses) of the invention include administering to the subject, e.g., a human, a therapeutically effective amount of an iRNA targeting a Serpinc1 gene or a pharmaceutical composition comprising an iRNA targeting a Serpinc1 gene, thereby treating the subject having a disorder that would benefit from reduction in Serpinc1 expression.

[0394] In one aspect, the invention provides methods of preventing at least one symptom in a subject having a disorder that would benefit from reduction in Serpinc1 expression. The methods include administering to the subject a therapeutically effective amount of the iRNA, e.g., dsRNA, or vector of the invention, thereby preventing at least one symptom in the subject having a disorder that would benefit from reduction in Serpinc1 expression. For example, the invention provides methods for preventing bleeding in a subject suffering from a disorder that would benefit from reduction in Serpinc1 expression, e.g., a hemophilia

[0395] In another aspect, the present invention provides use of a therapeutically effective amount of an iRNA of the invention for treating a subject, e.g., a subject that would benefit from a reduction and/or inhibition of Serpinc1 expression. The iRNA includes iRNA targeting a Serpinc1 gene or a pharmaceutical composition comprising an iRNA targeting a Serpinc1 gene.

[0396] In yet another aspect, the present invention provides use of an iRNA of the invention targeting a Serpinc1 gene or a pharmaceutical composition comprising an iRNA targeting a Serpinc1 gene in the manufacture of a medicament for treating a subject, e.g., a subject that would benefit from a reduction and/or inhibition of Serpinc1 expression.

[0397] In another aspect, the invention provides uses of an iRNA, e.g., a dsRNA, of the invention for preventing at least one symptom in a subject suffering from a disorder that would benefit from a reduction and/or inhibition of Serpinc1 expression, such as a bleeding disorder, e.g., a hemophilia.

[0398] In a further aspect, the present invention provides uses of an iRNA of the invention in the manufacture of a medicament for preventing at least one symptom in a subject suffering from a disorder that would benefit from a reduction and/or inhibition of Serpinc1 expression, such as a bleeding disorder, e.g., a hemophilia. An iRNA of the invention may be administered in “naked” form, or as a “free iRNA.” A naked iRNA is administered in the absence of a pharmaceutical composition. The naked iRNA may be in a suitable buffer solution. The buffer solution may comprise acetate, citrate, prolamine, carbonate, or phosphate, or any combination thereof. In one embodiment, the buffer solution is phosphate buffered saline (PBS). The pH and osmolarity of the buffer solution containing the iRNA can be adjusted such that it is suitable for administering to a subject.

[0399] Alternatively, an iRNA of the invention may be administered as a pharmaceutical composition, such as a dsRNA liposomal formulation.

[0400] Subjects that would benefit from a reduction and/or inhibition of Serpinc1gene expression are those having a bleeding disorder, e.g., an inherited bleeding disorder or an acquired bleeding disorder as described herein. In one embodiment, a subject having an inherited bleeding disorder has a hemophilia, e.g., hemophilia A, B, or C. In one embodiment, a subject having an inherited bleeding disorder, e.g., a hemophilia, is an inhibitor subject. In one embodiment, the inhibitor subject has hemophilia A. In another embodiment, the inhibitor subject has hemophilia B. In yet another embodiment, the inhibitor subject has hemophilia C. Treatment of a subject that would benefit from a reduction and/or inhibition of Serpinc1 gene expression includes therapeutic (e.g., on-demand, e.g., the subject is bleeding (spontaneous bleeding or bleeding as a result of trauma) and failing to clot) and prophylactic (e.g., the subject is not bleeding and/or is to undergo surgery) treatment.

[0401] The invention further provides methods and uses for the use of an iRNA or a pharmaceutical composition thereof, e.g., for treating a subject that would benefit from reduction and/or inhibition of Serpinc1 expression, e.g., a subject having a bleeding disorder, in combination with other pharmaceuticals and/or other therapeutic methods, e.g., with known pharmaceuticals and/or known therapeutic methods, such as, for example, those which are currently employed for treating these disorders. For example, in certain embodiments, an iRNA targeting Serpinc1 is administered in combination with, e.g., an agent useful in treating a bleeding disorder as described elsewhere herein. For example, additional therapeutics and therapeutic methods suitable for treating a subject that would benefit from reducton in Serpinc1 expression, e.g., a subject having a bleeding disorder, include fresh-frozen plasma (FFP); recombinant FVIIa; recombinant FIX; FXI concentrates; virus-inactivated, vWF-containing FVIII concentrates; desensitization therapy which may include large doses of FVIII or FIX, along with steroids or intravenous immunoglobulin (IVIG) and cyclophosphamide; plasmapheresis in conjunction with immunosuppression and infusion of FVIII or FIX, with or without antifibrinolytic therapy; immune tolerance induction (ITI), with or without immunosuppressive therapy (e.g., cyclophosphamide, prednisone, and/or anti-CD20); desmopressin acetate [DDAVP]; antifibrinolytics, such as aminocaproic acid and tranexamic acid; activated prothrombin complex concentrate (PCC); antihemophilic agents; corticosteroids; immunosuppressive agents; and estrogens. The iRNA and an additional therapeutic agent and/or treatment may be administered at the same time and/or in the same combination, e.g., parenterally, or the additional therapeutic agent can be administered as part of a separate composition or at separate times and/or by another method known in the art or described herein.

[0402] In one embodiment, the methods and uses include administering a composition featured herein such that expression of the target Serpinc1 gene is decreased, such as for about 1, 2, 3, 4, 5, 6, 7, 8, 12, 16, 18, 24, 28, 32, 36, 40, 44, 48, 52, 56, 60, 64, 68, 72, 76, or about 80 hours. In one embodiment, expression of the target Serpinc1 gene is decreased for an extended duration, e.g., at least about two, three, four, five, six, seven days or more, e.g., about one week, two weeks, three weeks, or about four weeks or longer.

[0403] Preferably, the iRNAs useful for the methods, uses, and compositions featured herein specifically target RNAs (primary or processed) of the target Serpinc1 gene. Compositions, uses, and methods for inhibiting the expression of these genes using iRNAs can be prepared and performed as described herein.

[0404] Administration of the dsRNA according to the methods and uses of the invention may result in a reduction of the severity, signs, symptoms, and/or markers of such diseases or disorders in a patient with a bleeding disorder. By “reduction” in this context is meant a statistically significant decrease in such level. The reduction can be, for example, at least about 5%, 10%, 15%, 20%, 25%, 30%, 35%, 40%, 45%, 50%, 55%, 60%, 65%, 70%, 75%, 80%, 85%, 90%, 95%, or about 100%.

[0405] Efficacy of treatment or prevention of disease can be assessed, for example by measuring disease progression, disease remission, symptom severity, frequency of bleeds, reduction in pain, quality of life, dose of a medication required to sustain a treatment effect, level of a disease marker or any other measurable parameter appropriate for a given disease being treated or targeted for prevention. It is well within the ability of one skilled in the art to monitor efficacy of treatment or prevention by measuring any one of such parameters, or any combination of parameters. For example, efficacy of treatment of a bleeding disorder may be assessed, for example, by periodic monitoring of thrombin:anti-thrombin levels. Comparisons of the later readings with the initial readings provide a physician an indication of whether the treatment is effective. It is well within the ability of one skilled in the art to monitor efficacy of treatment or prevention by measuring any one of such parameters, or any combination of parameters. In connection with the administration of an iRNA targeting Serpinc1 or pharmaceutical composition thereof, “effective against” a bleeding disorder indicates that administration in a clinically appropriate manner results in a beneficial effect for at least a statistically significant fraction of patients, such as a improvement of symptoms, a cure, a reduction in disease, extension of life, improvement in quality of life, or other effect generally recognized as positive by medical doctors familiar with treating bleeding disorders and the related causes.

[0406] A treatment or preventive effect is evident when there is a statistically significant improvement in one or more parameters of disease status, or by a failure to worsen or to develop symptoms where they would otherwise be anticipated. As an example, a favorable change of at least 10% in a measurable parameter of disease, and preferably at least 20%, 30%, 40%, 50% or more can be indicative of effective treatment. Efficacy for a given iRNA drug or formulation of that drug can also be judged using an experimental animal model for the given disease as known in the art. When using an experimental animal model, efficacy of treatment is evidenced when a statistically significant reduction in a marker or symptom is observed.

[0407] Alternatively, the efficacy can be measured by a reduction in the severity of disease as determined by one skilled in the art of diagnosis based on a clinically accepted disease severity grading scale, as but one example the Child-Pugh score (sometimes the Child-Turcotte-Pugh score). Any positive change resulting in e.g., lessening of severity of disease measured using the appropriate scale, represents adequate treatment using an iRNA or iRNA formulation as described herein.

[0408] Subjects can be administered a therapeutic amount of iRNA, such as about 0.01 mg/kg, 0.02 mg/kg, 0.03 mg/kg, 0.04 mg/kg, 0.05 mg/kg, 0.1 mg/kg, 0.15 mg/kg, 0.2 mg/kg, 0.25 mg/kg, 0.3 mg/kg, 0.35 mg/kg, 0.4 mg/kg, 0.45 mg/kg, 0.5 mg/kg, 0.55 mg/kg, 0.6 mg/kg, 0.65 mg/kg, 0.7 mg/kg, 0.75 mg/kg, 0.8 mg/kg, 0.85 mg/kg, 0.9 mg/kg, 0.95 mg/kg, 1.0 mg/kg, 1.1 mg/kg, 1.2 mg/kg, 1.3 mg/kg, 1.4 mg/kg, 1.5 mg/kg, 1.6 mg/kg, 1.7 mg/kg, 1.8 mg/kg, 1.9 mg/kg, 2.0 mg/kg, 2.1 mg/kg, 2.2 mg/kg, 2.3 mg/kg, 2.4 mg/kg, 2.5 mg/kg dsRNA, 2.6 mg/kg dsRNA, 2.7 mg/kg dsRNA, 2.8 mg/kg dsRNA, 2.9 mg/kg dsRNA, 3.0 mg/kg dsRNA, 3.1 mg/kg dsRNA, 3.2 mg/kg dsRNA, 3.3 mg/kg dsRNA, 3.4 mg/kg dsRNA, 3.5 mg/kg dsRNA, 3.6 mg/kg dsRNA, 3.7 mg/kg dsRNA, 3.8 mg/kg dsRNA, 3.9 mg/kg dsRNA, 4.0 mg/kg dsRNA, 4.1 mg/kg dsRNA, 4.2 mg/kg dsRNA, 4.3 mg/kg dsRNA, 4.4 mg/kg dsRNA, 4.5 mg/kg dsRNA, 4.6 mg/kg dsRNA, 4.7 mg/kg dsRNA, 4.8 mg/kg dsRNA, 4.9 mg/kg dsRNA, 5.0 mg/kg dsRNA, 5.1 mg/kg dsRNA, 5.2 mg/kg dsRNA, 5.3 mg/kg dsRNA, 5.4 mg/kg dsRNA, 5.5 mg/kg dsRNA, 5.6 mg/kg dsRNA, 5.7 mg/kg dsRNA, 5.8 mg/kg dsRNA, 5.9 mg/kg dsRNA, 6.0 mg/kg dsRNA, 6.1 mg/kg dsRNA, 6.2 mg/kg dsRNA, 6.3 mg/kg dsRNA, 6.4 mg/kg dsRNA, 6.5 mg/kg dsRNA, 6.6 mg/kg dsRNA, 6.7 mg/kg dsRNA, 6.8 mg/kg dsRNA, 6.9 mg/kg dsRNA, 7.0 mg/kg dsRNA, 7.1 mg/kg dsRNA, 7.2 mg/kg dsRNA, 7.3 mg/kg dsRNA, 7.4 mg/kg dsRNA, 7.5 mg/kg dsRNA, 7.6 mg/kg dsRNA, 7.7 mg/kg dsRNA, 7.8 mg/kg dsRNA, 7.9 mg/kg dsRNA, 8.0 mg/kg dsRNA, 8.1 mg/kg dsRNA, 8.2 mg/kg dsRNA, 8.3 mg/kg dsRNA, 8.4 mg/kg dsRNA, 8.5 mg/kg dsRNA, 8.6 mg/kg dsRNA, 8.7 mg/kg dsRNA, 8.8 mg/kg dsRNA, 8.9 mg/kg dsRNA, 9.0 mg/kg dsRNA, 9.1 mg/kg dsRNA, 9.2 mg/kg dsRNA, 9.3 mg/kg dsRNA, 9.4 mg/kg dsRNA, 9.5 mg/kg dsRNA, 9.6 mg/kg dsRNA, 9.7 mg/kg dsRNA, 9.8 mg/kg dsRNA, 9.9 mg/kg dsRNA, 9.0 mg/kg dsRNA, 10 mg/kg dsRNA, 15 mg/kg dsRNA, 20 mg/kg dsRNA, 25 mg/kg dsRNA, 30 mg/kg dsRNA, 35 mg/kg dsRNA, 40 mg/kg dsRNA, 45 mg/kg dsRNA, or about 50 mg/kg dsRNA. Values and ranges intermediate to the recited values are also intended to be part of this invention.

[0409] In certain embodiments, for example, when a composition of the invention comprises a dsRNA as described herein and a lipid, subjects can be administered a therapeutic amount of iRNA, such as about 0.01 mg/kg to about 5 mg/kg, about 0.01 mg/kg to about 10 mg/kg, about 0.05 mg/kg to about 5 mg/kg, about 0.05 mg/kg to about 10 mg/kg, about 0.1 mg/kg to about 5 mg/kg, about 0.1 mg/kg to about 10 mg/kg, about 0.2 mg/kg to about 5 mg/kg, about 0.2 mg/kg to about 10 mg/kg, about 0.3 mg/kg to about 5 mg/kg, about 0.3 mg/kg to about 10 mg/kg, about 0.4 mg/kg to about 5 mg/kg, about 0.4 mg/kg to about 10 mg/kg, about 0.5 mg/kg to about 5 mg/kg, about 0.5 mg/kg to about 10 mg/kg, about 1 mg/kg to about 5 mg/kg, about 1 mg/kg to about 10 mg/kg, about 1.5 mg/kg to about 5 mg/kg, about 1.5 mg/kg to about 10 mg/kg, about 2 mg/kg to about about 2.5 mg/kg, about 2 mg/kg to about 10 mg/kg, about 3 mg/kg to about 5 mg/kg, about 3 mg/kg to about 10 mg/kg, about 3.5 mg/kg to about 5 mg/kg, about 4 mg/kg to about 5 mg/kg, about 4.5 mg/kg to about 5 mg/kg, about 4 mg/kg to about 10 mg/kg, about 4.5 mg/kg to about 10 mg/kg, about 5 mg/kg to about 10 mg/kg, about 5.5 mg/kg to about 10 mg/kg, about 6 mg/kg to about 10 mg/kg, about 6.5 mg/kg to about 10 mg/kg, about 7 mg/kg to about 10 mg/kg, about 7.5 mg/kg to about 10 mg/kg, about 8 mg/kg to about 10 mg/kg, about 8.5 mg/kg to about 10 mg/kg, about 9 mg/kg to about 10 mg/kg, or about 9.5 mg/kg to about 10 mg/kg. Values and ranges intermediate to the recited values are also intended to be part of this invention.

[0410] For example, the dsRNA may be administered at a dose of about 0.1, 0.2, 0.3, 0.4, 0.5, 0.6, 0.7, 0.8, 0.9, 1, 1.1, 1.2, 1.3, 1.4, 1.5, 1.6, 1.7, 1.8, 1.9, 2, 2.1, 2.2, 2.3, 2.4, 2.5, 2.6, 2.7, 2.8, 2.9, 3, 3.1, 3.2, 3.3, 3.4, 3.5, 3.6, 3.7, 3.8, 3.9, 4, 4.1, 4.2, 4.3, 4.4, 4.5, 4.6, 4.7, 4.8, 4.9, 5, 5.1, 5.2, 5.3, 5.4, 5.5, 5.6, 5.7, 5.8, 5.9, 6, 6.1, 6.2, 6.3, 6.4, 6.5, 6.6, 6.7, 6.8, 6.9, 7, 7.1, 7.2, 7.3, 7.4, 7.5, 7.6, 7.7, 7.8, 7.9, 8, 8.1, 8.2, 8.3, 8.4, 8.5, 8.6, 8.7, 8.8, 8.9, 9, 9.1, 9.2, 9.3, 9.4, 9.5, 9.6, 9.7, 9.8, 9.9, or about 10 mg/kg. Values and ranges intermediate to the recited values are also intended to be part of this invention.

[0411] In other embodiments, for example, when a composition of the invention comprises a dsRNA as described herein and an N-acetylgalactosamine, subjects can be administered a therapeutic amount of iRNA, such as a dose of about 0.1 to about 50 mg/kg, about 0.25 to about 50 mg/kg, about 0.5 to about 50 mg/kg, about 0.75 to about 50 mg/kg, about 1 to about 50 mg/kg, about 1.5 to about 50 mg/kg, about 2 to about 50 mg/kg, about 2.5 to about 50 mg/kg, about 3 to about 50 mg/kg, about 3.5 to about 50 mg/kg, about 4 to about 50 mg/kg, about 4.5 to about 50 mg/kg, about 5 to about 50 mg/kg, about 7.5 to about 50 mg/kg, about 10 to about 50 mg/kg, about 15 to about 50 mg/kg, about 20 to about 50 mg/kg, about 20 to about 50 mg/kg, about 25 to about 50 mg/kg, about 25 to about 50 mg/kg, about 30 to about 50 mg/kg, about 35 to about 50 mg/kg, about 40 to about 50 mg/kg, about 45 to about 50 mg/kg, about 0.1 to about 45 mg/kg, about 0.25 to about 45 mg/kg, about 0.5 to about 45 mg/kg, about 0.75 to about 45 mg/kg, about 1 to about 45 mg/kg, about 1.5 to about 45 mg/kg, about 2 to about 45 mg/kg, about 2.5 to about 45 mg/kg, about 3 to about 45 mg/kg, about 3.5 to about 45 mg/kg, about 4 to about 45 mg/kg, about 4.5 to about 45 mg/kg, about 5 to about 45 mg/kg, about 7.5 to about 45 mg/kg, about 10 to about 45 mg/kg, about 15 to about 45 mg/kg, about 20 to about 45 mg/kg, about 20 to about 45 mg/kg, about 25 to about 45 mg/kg, about 25 to about 45 mg/kg, about 30 to about 45 mg/kg, about 35 to about 45 mg/kg, about 40 to about 45 mg/kg, about 0.1 to about 40 mg/kg, about 0.25 to about 40 mg/kg, about 0.5 to about 40 mg/kg, about 0.75 to about 40 mg/kg, about 1 to about 40 mg/kg, about 1.5 to about 40 mg/kg, about 2 to about 40 mg/kg, about 2.5 to about 40 mg/kg, about 3 to about 40 mg/kg, about 3.5 to about 40 mg/kg, about 4 to about 40 mg/kg, about 4.5 to about 40 mg/kg, about 5 to about 40 mg/kg, about 7.5 to about 40 mg/kg, about 10 to about 40 mg/kg, about 15 to about 40 mg/kg, about 20 to about 40 mg/kg, about 20 to about 40 mg/kg, about 25 to about 40 mg/kg, about 25 to about 40 mg/kg, about 30 to about 40 mg/kg, about 35 to about 40 mg/kg, about 0.1 to about 30 mg/kg, about 0.25 to about 30 mg/kg, about 0.5 to about 30 mg/kg, about 0.75 to about 30 mg/kg, about 1 to about 30 mg/kg, about 1.5 to about 30 mg/kg, about 2 to about 30 mg/kg, about 2.5 to about 30 mg/kg, about 3 to about 30 mg/kg, about 3.5 to about 30 mg/kg, about 4 to about 30 mg/kg, about 4.5 to about 30 mg/kg, about 5 to about 30 mg/kg, about 7.5 to about 30 mg/kg, about 10 to about 30 mg/kg, about 15 to about 30 mg/kg, about 20 to about 30 mg/kg, about 20 to about 30 mg/kg, about 25 to about 30 mg/kg, about 0.1 to about 20 mg/kg, about 0.25 to about 20 mg/kg, about 0.5 to about 20 mg/kg, about 0.75 to about 20 mg/kg, about 1 to about 20 mg/kg, about 1.5 to about 20 mg/kg, about 2 to about 20 mg/kg, about 2.5 to about 20 mg/kg, about 3 to about 20 mg/kg, about 3.5 to about 20 mg/kg, about 4 to about 20 mg/kg, about 4.5 to about 20 mg/kg, about 5 to about 20 mg/kg, about 7.5 to about 20 mg/kg, about 10 to about 20 mg/kg, or about 15 to about 20 mg/kg. In one embodiment, when a composition of the invention comprises a dsRNA as described herein and an N-acetylgalactosamine, subjects can be administered a therapeutic amount of about 10 to about 30 mg/kg of dsRNA. Values and ranges intermediate to the recited values are also intended to be part of this invention.

[0412] For example, subjects can be administered a therapeutic amount of iRNA, such as about 0.1, 0.2, 0.3, 0.4, 0.5, 0.6, 0.7, 0.8, 0.9, 1, 1.1, 1.2, 1.3, 1.4, 1.5, 1.6, 1.7, 1.8, 1.9, 2, 2.1, 2.2, 2.3, 2.4, 2.5, 2.6, 2.7, 2.8, 2.9, 3, 3.1, 3.2, 3.3, 3.4, 3.5, 3.6, 3.7, 3.8, 3.9, 4, 4.1, 4.2, 4.3, 4.4, 4.5, 4.6, 4.7, 4.8, 4.9, 5, 5.1, 5.2, 5.3, 5.4, 5.5, 5.6, 5.7, 5.8, 5.9, 6, 6.1, 6.2, 6.3, 6.4, 6.5, 6.6, 6.7, 6.8, 6.9, 7, 7.1, 7.2, 7.3, 7.4, 7.5, 7.6, 7.7, 7.8, 7.9, 8, 8.1, 8.2, 8.3, 8.4, 8.5, 8.6, 8.7, 8.8, 8.9, 9, 9.1, 9.2, 9.3, 9.4, 9.5, 9.6, 9.7, 9.8, 9.9, 10, 10.5, 11, 11.5, 12, 12.5, 13, 13.5, 14, 14.5, 15, 15.5, 16, 16.5, 17, 17.5, 18, 18.5, 19, 19.5, 20, 20.5, 21, 21.5, 22, 22.5, 23, 23.5, 24, 24.5, 25, 25.5, 26, 26.5, 27, 27.5, 28, 28.5, 29, 29.5, 30, 31, 32, 33, 34, 34, 35, 36, 37, 38, 39, 40, 41, 42, 43, 44, 45, 46, 47, 48, 49, or about 50 mg/kg. Values and ranges intermediate to the recited values are also intended to be part of this invention.

[0413] The iRNA can be administered by intravenous infusion over a period of time, such as over a 5, 6, 7, 8, 9, 10, 11, 12, 13, 14, 15, 16, 17, 18, 19, 20, and 21, 22, 23, 24, or about a 25 inute period. The administration may be repeated, for example, on a regular basis, such as weekly, biweekly (i.e., every two weeks) for one month, two months, three months, four months or longer. After an initial treatment regimen, the treatments can be administered on a less frequent basis. For example, after administration weekly or biweekly for three months, administration can be repeated once per month, for six months or a year or longer.

[0414] In one embodiment, the present invention provides methods for treating a subject suffering from a bleeding disorder, e.g., a hemophilia, by subcutaneously administering to said subject compound AD-57213 at a cumulative weekly dose of about 0.5 mg/kg to about 5 mg/kg, or about 1 mg/kg to about 3 mg/kg.

[0415] In one embodiment, the methods may include subcutaneously administering to the subject a cumulative weekly dose of about 0.5 mg/kg. For example, in one embodiment, the methods may include administering to the subject a cumulative weekly dose of about 0.5 mg/kg as 0.5 mg/kg every week. In another embodiment, the methods may include administering to the subject a cumulative weekly dose of about 0.5 mg/kg as 1 mg/kg every two weeks.

[0416] In another embodiment, the methods may include subcutaneously administering to the subject a cumulative weekly dose of about 1.5 mg/kg. For example, in one embodiment, the methods may include administering to the subject a cumulative weekly dose of about 1.5 mg/kg as 1.5 mg/kg every week. In another embodiment, the methods may include administering to the subject a cumulative weekly dose of about 1.5 mg/kg as 3 mg/kg every two weeks.

[0417] In another embodiment, the methods may include subcutaneously administering to the subject a cumulative weekly dose of about 2 mg/kg. For example, in one embodiment, the methods may include administering to the subject a cumulative weekly dose of about 2 mg/kg as 2 mg/kg every week. In another embodiment, the methods may include administering to the subject a cumulative weekly dose of about 2 mg/kg as 4 mg/kg every two weeks.

[0418] In yet another embodiment, the methods may include subcutaneously administering to the subject a cumulative weekly dose of about 3 mg/kg. For example, in one embodiment, the methods may include administering to the subject a cumulative weekly dose of about 3 mg/kg as 3 mg/kg every week. In another embodiment, the methods may include administering to the subject a cumulative weekly dose of about 3 mg/kg as 6 mg/kg every two weeks.

[0419] In another embodiment, the present invention provides methods for preventing in a subject at least one symptom of a bleeding disorder, e.g., a hemophilia, by subcutaneously administering to the subject compound AD-57213 at a cumulative weekly dose of about 0.5 mg/kg to about 5 mg/kg or about 1 mg/kg to about 3 mg/kg.

[0420] In one embodiment, the methods may include subcutaneously administering to the subject a cumulative weekly dose of about 0.5 mg/kg. For example, in one embodiment, the methods may include administering to the subject a cumulative weekly dose of about 0.5 mg/kg as 0.5 mg/kg every week. In another embodiment, the methods may include administering to the subject a cumulative weekly dose of about 0.5 mg/kg as 1 mg/kg every two weeks.

[0421] In another embodiment, the methods may include subcutaneously administering to the subject a cumulative weekly dose of about 1.5 mg/kg. For example, in one embodiment, the methods may include administering to the subject a cumulative weekly dose of about 1.5 mg/kg as 1.5 mg/kg every week. In another embodiment, the methods may include administering to the subject a cumulative weekly dose of about 1.5 mg/kg as 3 mg/kg every two weeks.

[0422] In another embodiment, the methods may include subcutaneously administering to the subject a cumulative weekly dose of about 2 mg/kg. For example, in one embodiment, the methods may include administering to the subject a cumulative weekly dose of about 2 mg/kg as 2 mg/kg every week. In another embodiment, the methods may include administering to the subject a cumulative weekly dose of about 2 mg/kg as 4 mg/kg every two weeks.

[0423] In yet another embodiment, the methods may include subcutaneously administering to the subject a cumulative weekly dose of about 3 mg/kg. For example, in one embodiment, the methods may include administering to the subject a cumulative weekly dose of about 3 mg/kg as 3 mg/kg every week. In another embodiment, the methods may include administering to the subject a cumulative weekly dose of about 3 mg/kg as 6 mg/kg every two weeks.

[0424] Administration of the iRNA can reduce Serpinc1 levels, e.g., in a cell, tissue, blood, urine or other compartment of the patient by at least about 5%, 6, 7, 8, 9, 10, 11, 12, 13, 14, 15, 16, 17, 18, 19, 20, and 21, 22, 23, 24, 25, 26, 27, 28, 29, 30, 31, 32, 33, 34, 35, 36, 37, 38, 39, 40, 41, 42, 43, 44, 45, 46, 47, 48, 39, 50, 51, 52, 53, 54, 55, 56, 57, 58, 59, 60, 61, 62, 63, 64, 65, 66, 67, 68, 69, 70, 71, 72, 73, 74, 75, 76, 77, 78, 79, 80, 81, 82, 83, 84, 85, 86, 87, 88, 89, 90, 91, 92, 93, 94, 95, 96, 97, 98, or at least about 99% or more.

[0425] In one embodiment, the treatment and/or preventive methods include subcutaneously administering to a subject compound AD-57213 at a dose sufficient to inhibit reduce Serpinc1 levels, e.g., in a cell, tissue, blood, urine or other compartment of the patient by at least about by about 40, 41, 42, 43, 44, 45, 46, 47, 48, 49, 50, 51, 52, 53, 54, 55, 56, 57, 58, 69, 60, 61, 62, 63, 64, 65, 66, 67, 68, 69, 70, 71, 72, 73, 74, 75, 76, 77, 78, 79, or about 80%.

[0426] Before administration of a full dose of the iRNA, patients can be administered a smaller dose, such as a 5% infusion reaction, and monitored for adverse effects, such as an allergic reaction. In another example, the patient can be monitored for unwanted immunostimulatory effects, such as increased cytokine (e.g., TNF-alpha or INF-alpha) levels.

[0427] Owing to the inhibitory effects on Serpinc1 expression, a composition according to the invention or a pharmaceutical composition prepared therefrom can enhance the quality of life.

[0428] Unless otherwise defined, all technical and scientific terms used herein have the same meaning as commonly understood by one of ordinary skill in the art to which this invention belongs. Although methods and materials similar or equivalent to those described herein can be used in the practice or testing of the iRNAs and methods featured in the invention, suitable methods and materials are described below. All publications, patent applications, patents, and other references mentioned herein are incorporated by reference in their entirety. In case of conflict, the present specification, including definitions, will control. In addition, the materials, methods, and examples are illustrative only and not intended to be limiting.

### EXAMPLES

### Example 1: IRNA Synthesis

### Source of Reagents

[0429] Where the source of a reagent is not specifically given herein, such reagent can be obtained from any supplier of reagents for molecular biology at a quality/purity standard for application in molecular biology.

### Transcripts

[0430] siRNA design was carried out to identify siRNAs targeting human, rhesus (Macaca mulatta), dog, mouse, and rat SERPINC1 transcripts annotated in the NCBI Gene database (http://www.ncbi.nlm.nih.gov/gene/). Design used the following transcripts from the NCBI RefSeq collection: Human—NM_000488.2, NM_000488.3; Rhesus—NM_001104583.1; Dog—XM_856414.1; Mouse—NM_080844.4; Rat—NM_001012027.1. Due to high primate/canine/rodent sequence divergence, siRNA duplexes were designed in several separate batches, including but not limited to batches containing duplexes matching human and rhesus transcripts only; human, rhesus, and dog transcripts only; human, rhesus, mouse, and rat transcripts only; and mouse and rat transcripts only. All siRNA duplexes were designed that shared 100% identity the listed human transcript and other species transcripts considered in each design batch (above).

siRNA Design, Specificity, and Efficacy Prediction

[0431] The predicted specificity of all possible 19mers was predicted from each sequence. Candidate 19mers were then selected that lacked repeats longer than 7 nucleotides. These 874 candidate human/rhesus, 67 human/rhesus/dog, 103 human/rhesus/mouse/rat, and 569 mouse/rat siRNAs were used in comprehensive searches against the appropriate transcriptomes (defined as the set of NM_and XM_records within the human, rhesus, dog, mouse, or rat NCBI Refseq sets) using an exhaustive “brute-force” algorithm implemented in the python script ‘BruteForce.py’. The script next parsed the transcript-oligo alignments to generate a score based on the position and number of mismatches between the siRNA and any potential ‘off-target’ transcript. The off-target score is weighted to emphasize differences in the ‘seed’ region of siRNAs, in positions 2-9 from the 5′-end of the molecule.

[0432] Each oligo-transcript pair from the brute-force search was given a mismatch score by summing the individual mismatch scores; mismatches in the position 2-9 were counted as 2.8, mismatches in the cleavage site positions 10-11 were counted as 1.2, and mismatches in region 12-19 counted as 1.0. An additional off-target prediction was carried out by comparing the frequency of heptamers and octomers derived from 3 distinct, seed-derived hexamers of each oligo. The hexamers from positions 2-7 relative to the 5′ start were used to create 2 heptamers and one octamer. ‘Heptamer1’ was created by adding a 3′-A to the hexamer; heptamer2 was created by adding a 5′-A to the hexamer; the octomer was created by adding an A to both 5′- and 3′-ends of the hexamer. The frequency of octamers and heptamers in the human, rhesus, mouse, or rat 3′-UTRome (defined as the subsequence of the transcriptome from NCBI's Refseq database where the end of the coding region, the ‘CDS’, is clearly defined) was pre-calculated. The octamer frequency was normalized to the heptamer frequency using the median value from the range of octamer frequencies. A ‘mirSeedScore’ was then calculated by calculating the sum of ((3×normalized octamer count)+(2×heptamer2 count)+(1×heptamer1 count)).

[0433] Both siRNAs strands were assigned to a category of specificity according to the calculated scores: a score above 3 qualifies as highly specific, equal to 3 as specific and between 2.2 and 2.8 as moderately specific. The duplexes were sorted by the specificity of the antisense strand and those duplexes whose antisense oligos lacked GC at the first position, lacked G at both positions 13 and 14, and had 3 or more Us or As in the seed region were selected.

siRNA Sequence Selection

[0434] A total of 66 sense and 66 antisense derived human/rhesus, 6 sense and 6 antisense derived human/rhesus/mouse, 12 human/rhesus/mouse/rat, and 21 sense and 21 antisense derived mouse/rat siRNA oligos were synthesized and formed into duplexes. A detailed list of Sepinc1 sense and antisense strand sequences is shown in Tables 3 and 4.

siRNA Synthesis

[0435] I. General Small and Medium Scale RNA Synthesis Procedure

[0436] RNA oligonucleotides were synthesized at scales between 0.2-500 μmol using commercially available 5′-O-(4,4′-dimethoxytrityl)-2′-O-t-butyldimethylsilyl-3′-O-(2-cyanoethyl-N,N-diisopropyl)phosphoramidite monomers of uridine, 4-N-acetylcytidine, 6-N-benzoyladenosine and 2-N-isobutyrylguanosine and the corresponding 2′-O-methyl and 2′-fluoro phosphoramidites according to standard solid phase oligonucleotide synthesis protocols. The amidite solutions were prepared at 0.1-0.15 M concentration and 5-ethylthio-1H-tetrazole (0.25-0.6 M in acetonitrile) was used as the activator. Phosphorothioate backbone modifications were introduced during synthesis using 0.2 M phenylacetyl disulfide (PADS) in lutidine:acetonitrile (1:1) (v;v) or 0.1 M 3-(dimethylaminomethylene) amino-3H-1,2,4-dithiazole-5-thione (DDTT) in pyridine for the oxidation step. After completion of synthesis, the sequences were cleaved from the solid support and deprotected using methylamine followed by triethylamine.3HF to remove any 2′-O-t-butyldimethylsilyl protecting groups present.

[0437] For synthesis scales between 5-500 μmol and fully 2′ modified sequences (2′-fluoro and/or 2′-O-methyl or combinations thereof) the oligonucleotides where deprotected using 3:1 (v/v) ethanol and concentrated (28-32%) aqueous ammonia either at 35° C. 16 h or 55° C. for 5.5 h. Prior to ammonia deprotection the oligonucleotides where treated with 0.5 M piperidine in acetonitrile for 20 min on the solid support. The crude oligonucleotides were analyzed by LC-MS and anion-exchange HPLC (IEX-HPLC). Purification of the oligonucleotides was carried out by IEX HPLC using: 20 mM phosphate, 10%-15% ACN, pH=8.5 (buffer A) and 20 mM phosphate, 10%-15% ACN, 1 M NaBr, pH=8.5 (buffer B). Fractions were analyzed for purity by analytical HPLC. The product-containing fractions with suitable purity were pooled and concentrated on a rotary evaporator prior to desalting. The samples were desalted by size exclusion chromatography and lyophilized to dryness. Equal molar amounts of sense and antisense strands were annealed in 1×PBS buffer to prepare the corresponding siRNA duplexes.

[0438] For small scales (0.2-1 μmol), synthesis was performed on a MerMade 192 synthesizer in a 96 well format. In case of fully 2′-modified sequences (2′-fluoro and/or 2′-O-methyl or combinations thereof) the oligonucleotides where deprotected using methylamine at room temperature for 30-60 min followed by incubation at 60° C. for 30 min or using 3:1 (v/v) ethanol and concentrated (28-32%) aqueous ammonia at room temperature for 30-60 min followed by incubation at 40° C. for 1.5 hours. The crude oligonucleotides were then precipitated in a solution of acetonitrile:acetone (9:1) and isolated by centrifugation and decanting the supernatant. The crude oligonucleotide pellet was re-suspended in 20 mM NaOAc buffer and analyzed by LC-MS and anion exchange HPLC. The crude oligonucleotide sequences were desalted in 96 deep well plates on a 5 mL HiTrap Sephadex G25 column (GE Healthcare). In each well about 1.5 mL samples corresponding to an individual sequence was collected. These purified desalted oligonucleotides were analyzed by LC-MS and anion exchange chromatography. Duplexes were prepared by annealing equimolar amounts of sense and antisense sequences on a Tecan robot. Concentration of duplexes was adjusted to 10 μM in 1×PBS buffer.

[0439] II. Synthesis of GalNAc-Conjugated Oligonucleotides for In Vivo Analysis

[0440] Oligonucleotides conjugated with GalNAc ligand at their 3′-terminus were synthesized at scales between 0.2-500 μmol using a solid support pre-loaded with a Y-shaped linker bearing a 4,4′-dimethoxytrityl (DMT)-protected primary hydroxy group for oligonucleotide synthesis and a GalNAc ligand attached through a tether.

[0441] For synthesis of GalNAc conjugates in the scales between 5-500 μmol the above synthesis protocol for RNA was followed with the following adaptions: For polystyrene-based synthesis supports 5% dichloroacetic acid in toluene was used for DMT-cleavage during synthesis. Cleavage from the support and deprotection was performed as described above. Phosphorothioate-rich sequences (usually >5 phorphorothioates) were synthesized without removing the final 5′-DMT group (“DMT-on”) and, after cleavage and deprotection as described above, purified by reverse phase HPLC using 50 mM ammonium acetate in water (buffer A) and 50 mM ammoniumacetate in 80% acetonitirile (buffer B). Fractions were analyzed for purity by analytical HPLC and/or LC-MS. The product-containing fractions with suitable purity were pooled and concentrated on a rotary evaporator. The DMT-group was removed using 20%-25% acetic acid in water until completion. The samples were desalted by size exclusion chromatography and lyophilized to dryness. Equal molar amounts of sense and antisense strands were annealed in 1×PBS buffer to prepare the corresponding siRNA duplexes.

[0442] For small scale synthesis of GalNAc conjugates (0.2-1 μmol), including sequences with multiple phosphorothioate linkages, the protocols described above for synthesis of RNA or fully 2′-F/2′-OMe-containing sequences on MerMade platform were applied. Synthesis was performed on pre-packed columns containing GalNAc-functionalized controlled pore glass support.

### Example 2: In Vitro Screening

### Cell Culture and Transfections

[0443] Hep3B cells (ATCC, Manassas, VA) were grown to near confluence at 37° C. in an atmosphere of 5% CO2 in Eagle's Minimum Essential Medium (ATCC) supplemented with 10% FBS, streptomycin, and glutamine (ATCC) before being released from the plate by trypsinization. For mouse cross reactive duplexes, primary mouse hepatocytes (PMH) were freshly isolated less than 1 hour prior to transfections and grown in primary hepatocyte media. For both Hep3B and PMH, transfection was carried out by adding 14.8 μl of Opti-MEM plus 0.2 μl of Lipofectamine RNAiMax per well (Invitrogen, Carlsbad CA. cat #13778-150) to 5 μl of each siRNA duplex to an individual well in a 96-well plate. The mixture was then incubated at room temperature for 15 minutes. Eighty μl of complete growth media without antibiotic containing ˜2×10⁴ Hep3B cells were then added to the siRNA mixture. Cells were incubated for 24 hours prior to RNA purification. Single dose experiments were performed at 10 nM and 0.1 nM final duplex concentration and dose response experiments were done using 8×5-fold serial dilutions over the range of 10 nM to 128 pM (see FIGS. 2A and 2B).

### Free Uptake Transfection

[0444] Five μ1 of each GalNac conjugated siRNA in PBS was combined with 4×10⁴ freshly thawed cryopreserved Cynomolgus monkey hepatocytes resuspended in 95 μl of In Vitro Gro CP media (In Vitro Technologies-Celsis, Baltimore, MD) in each well of a 96 well plate. The mixture was incubated for about 24 hrs at 37° C. in an atmosphere of 5% CO₂. siRNAs were tested at final concentrations of 100 nM, 10 nM and 0.1 nM for efficacy free uptake assays.

Total RNA Isolation Using DYNABEADS mRNA Isolation Kit (Invitrogen, Part #: 610-12)

[0445] Cells were harvested and lysed in 150 μl of Lysis/Binding Buffer then mixed for 5 minutes at 850 rpm using an Eppendorf Thermomixer (the mixing speed was the same throughout the process). Ten microliters of magnetic beads and 80 μl Lysis/Binding Buffer mixture were added to a round bottom plate and mixed for 1 minute. Magnetic beads were captured using a magnetic stand and the supernatant was removed without disturbing the beads. After removing the supernatant, the lysed cells were added to the remaining beads and mixed for minutes. After removing the supernatant, magnetic beads were washed 2 times with 150 μl Wash Buffer A and mixed for 1 minute. The beads were captured again and the supernatant was removed. The beads were then washed with 150 μl Wash Buffer B, captured and the supernatant was removed. The beads were next washed with 150 μl Elution Buffer, captured and the supernatant removed. Finally, the beads were allowed to dry for 2 minutes. After drying, 50 μl of Elution Buffer was added and mixed for 5 minutes at 70° C. The beads were captured on magnet for 5 minutes. 40 μl of supernatant was removed and added to another 96 well plate.

cDNA Synthesis Using ABI High Capacity cDNA Reverse Transcription Kit (Applied Biosystems, Foster City, CA, Cat #4368813)

[0446] A master mix of 2 μl 10× Buffer, 0.8 μl 25×dNTPs, 2 μl Random primers, 1 μl Reverse Transcriptase, 1 μl RNase inhibitor and 3.2 μl of H2O per reaction were added into 10 μl total RNA. cDNA was generated using a Bio-Rad C-1000 or S-1000 thermal cycler (Hercules, CA) through the following steps: 25° C. for 10 minutes, 37° C. for 120 minutes, 85° C. for 5 seconds, and 4° C. hold.

### Real Time PCR

[0447] Two μl of cDNA were added to a master mix containing 0.5 μl human GAPDH TaqMan Probe (Applied Biosystems Cat #4326317E), 0.5 μl human SERPINC1 TaqMan probe (Applied Biosystems cat #Hs00892758 ml) for human cells or 0.5 μl mouse GAPDH TaqMan Probe (Applied Biosystems Cat #4308313), 0.5 μl mouse SERPINC1 TaqMan probe (Applied Biosystems cat #Mm00446573 ml) for mouse cells and 5 μl Lightcycler 480 probe master mix (Roche Cat #04887301001) per well in a 384 well plates. Real time PCR was done in an ABI 7900HT Real Time PCR system (Applied Biosystems) using the ΔΔCt(RQ) assay. Each duplex was tested in two independent transfections and each transfection was assayed in duplicate, unless otherwise noted in the summary tables.

[0448] To calculate relative fold change in Serpinc1 mRNA levels, real time data were analyzed using the ΔΔCt method and normalized to assays performed with cells transfected with 10 nM AD-1955, or mock transfected cells. IC₅₀s were calculated using a 4 parameter fit model using XLFit and normalized to cells transfected with AD-1955 over the same dose range, or to its own lowest dose. Table 5 shows the results of a single dose screen in Hep3B cells and PMH cells transfected with the indicated iRNAs. Table 6 shows the results of dose response of the indicated iRNAs transfected into Hep3B and PMH cells.

[0449] The sense and antisense sequences of AD-1955 are:

[0450] SENSE: cuuAcGcuGAGuAcuucGAdTsdT (SEQ ID NO: 13)

[0451] ANTISENSE: UCGAAGuACUcAGCGuAAGdTsdT (SEQ ID NO: 14).

TABLE 2
Abbreviations of nucleotide monomers used in nucleic acid
sequence representation. It will be understood that
these monomers, when present in an oligonucleotide,
are mutually linked by 5′-3′-phosphodiester bonds.

| Abbreviation | Nucleotide(s) |
|---|---|
| A | Adenosine-3′-phosphate |
| Ab | beta-L-adenosine-3′-phosphate |
| Abs | beta-L-adenosine-3′-phosphorothioate |
| Af | 2′-fluoroadenosine-3′-phosphate |
| Afs | 2′-fluoroadenosine-3′-phosphorothioate |
| As | adenosine-3′-phosphorothioate |
| C | cytidine-3′-phosphate |
| Cb | beta-L-cytidine-3′-phosphate |
| Cbs | beta-L-cytidine-3′-phosphorothioate |
| Cf | 2′-fluorocytidine-3′-phosphate |
| Cfs | 2′-fluorocytidine-3′-phosphorothioate |
| (Chd) | 2′-O-hexadecyl-cytidine-3′-phosphate |
| (Chds) | 2′-O-hexadecyl-cytidine-3′-phosphorothioate |
| Cs | cytidine-3′-phosphorothioate |
| G | guanosine-3′-phosphate |
| Gb | beta-L-guanosine-3′-phosphate |
| Gbs | beta-L-guanosine-3′-phosphorothioate |
| Gf | 2′-fluoroguanosine-3′-phosphate |
| Gfs | 2′-fluoroguanosine-3′-phosphorothioate |
| Gs | guanosine-3′-phosphorothioate |
| T | 5′-methyluridine-3′-phosphate |
| Tb | beta-L-thymidine-3′-phosphate |
| Tbs | beta-L-thymidine-3′-phosphorothioate |
| Tf | 2′-fluoro-5-methyluridine-3′-phosphate |
| Tfs | 2′-fluoro-5-methyluridine-3′-phosphorothioate |
| Ts | 5-methyluridine-3′-phosphorothioate |
| U | Uridine-3′-phosphate |
| Ub | beta-L-uridine-3′-phosphate |
| Ubs | beta-L-uridine-3′-phosphorothioate |
| Uf | 2′-fluorouridine-3′-phosphate |
| Ufs | 2′-fluorouridine-3′-phosphorothioate |
| (Uhd) | 2′-O-hexadecyl-uridine-3′-phosphate |
| (Uhds) | 2′-O-hexadecyl-uridine-3′-phosphorothioate |
| Us | uridine-3′-phosphorothioate |
| N | any nucleotide (G, A, C, T or U) |
| a | 2′-O-methyladenosine-3′-phosphate |
| as | 2′-O-methyladenosine-3′-phosphorothioate |
| c | 2′-O-methylcytidine-3′-phosphate |
| cs | 2′-O-methylcytidine-3′-phosphorothioate |
| g | 2′-O-methylguanosine-3′-phosphate |
| gs | 2′-O-methylguanosine-3′-phosphorothioate |
| t | 2′-O-methyl-5-methyluridine-3′-phosphate |
| ts | 2′-O-methyl-5-methyluridine-3′-phosphorothioate |
| u | 2′-O-methyluridine-3′-phosphate |
| us | 2′-O-methyluridine-3′-phosphorothioate |
| dA | 2′-deoxyadenosine-3′-phosphate |
| dAs | 2′-deoxyadenosine-3′-phosphorothioate |
| dC | 2′-deoxycytidine-3′-phosphate |
| dCs | 2′-deoxycytidine-3′-phosphorothioate |
| dG | 2′-deoxyguanosine-3′-phosphate |
| dGs | 2′-deoxyguanosine-3′-phosphorothioate |
| dT | 2′-deoxythymidine |
| dTs | 2′-deoxythymidine-3′-phosphorothioate |
| dU | 2′-deoxyuridine |
| s | phosphorothioate linkage |
| L96 | N-[tris(GalNAc-alkyl)-amidodecanoyl)]- |
| | 4-hydroxyprolinol Hyp-(GalNAc-alkyl)3 |
| (Aeo) | 2′-O-methoxyethyladenosine-3′-phosphate |
| (Aeos) | 2′-O-methoxyethyladenosine-3′-phosphorothioate |
| (Geo) | 2′-O-methoxyethylguanosine-3′-phosphate |
| (Geos) | 2′-O-methoxyethylguanosine-3′-phosphorothioate |
| (Teo) | 2′-O-methoxyethyl-5-methyluridine-3′-phosphate |
| (Teos) | 2′-O-methoxyethyl-5-methyluridine-3′-phosphorothioate |
| (m5Ceo) | 2′-O-methoxyethyl-5-methylcytidine-3′-phosphate |
| (m5Ceos) | 2′-O-methoxyethyl-5-methylcytidine-3′-phosphorothioate |

TABLE 3
Unmodified Sense and antisense strand sequences of Serpinc1 dsRNAs (The
“Sense Sequence” column sequences are disclosed as SEQ ID NOs: 15-71,
respectively, in order of appearance, and the “Antisense Sequence”
column sequences are disclosed as SEQ ID NOs: 72-128, respectively,
in order of appearance)

| | | | Antisense | |
|---|---|---|---|---|
| Duplex Name | Sense Name | Sense Sequence | Name | Antisense Sequence |
| AD-50475.1-UM | A-104633.1 | CCCUGUGGACAUCUGCACA | A-104634.1 | UGUGCAGAUGUCCACAGGG |
| AD-50476.1-UM | A-104649.1 | CUACCACUUUCUAUCAGCA | A-104650.1 | UGCUGAUAGAAAGUGGUAG |
| AD-50477.1-UM | A-104665.1 | CUAUCGAAAAGCCAACAAA | A-104666.1 | UUUGUUGGCUUUUCGAUAG |
| AD-50478.1-UM | A-104681.1 | GGACUUCAAGGAAAAUGCA | A-104682.1 | UGCAUUUUCCUUGAAGUCC |
| AD-50479.1-UM | A-104697.1 | GUUAACACCAUUUACUUCA | A-104698.1 | UGAAGUAAAUGGUGUUAAC |
| AD-50480.1-UM | A-104713.1 | CCUGGUUUUUAUAAGAGAA | A-104714.1 | UUCUCUUAUAAAAACCAGG |
| AD-50481.1-UM | A-104635.1 | GACAUUCCCAUGAAUCCCA | A-104636.1 | UGGGAUUCAUGGGAAUGUC |
| AD-50482.1-UM | A-104651.1 | CACCUGGCAGAUUCCAAGA | A-104652.1 | UCUUGGAAUCUGCCAGGUG |
| AD-50483.1-UM | A-104667.1 | CGAAAAGCCAACAAAUCCU | A-104668.1 | AGGAUUUGUUGGCUUUUCG |
| AD-50484.1-UM | A-104683.1 | GAAAAUGCAGAGCAAUCCA | A-104684.1 | UGGAUUGCUCUGCAUUUUC |
| AD-50485.1-UM | A-104699.1 | GGCCUGUGGAAGUCAAAGU | A-104700.1 | ACUUUGACUUCCACAGGCC |
| AD-50486.1-UM | A-104715.1 | GAAGUUCCUCUGAACACUA | A-104716.1 | UAGUGUUCAGAGGAACUUC |
| AD-50487.1-UM | A-104637.1 | CCAUGAAUCCCAUGUGCAU | A-104638.1 | AUGCACAUGGGAUUCAUGG |
| AD-50488.1-UM | A-104653.1 | CAACUGAUGGAGGUAUUUA | A-104654.1 | UAAAUACCUCCAUCAGUUG |
| AD-50489.1-UM | A-104669.1 | CCAAGUUAGUAUCAGCCAA | A-104670.1 | UUGGCUGAUACUAACUUGG |
| AD-50490.1-UM | A-104685.1 | CGGCCAUCAACAAAUGGGU | A-104686.1 | ACCCAUUUGUUGAUGGCCG |
| AD-50491.1-UM | A-104701.1 | GAGGACGGCUUCAGUUUGA | A-104702.1 | UCAAACUGAAGCCGUCCUC |
| AD-50492.1-UM | A-104717.1 | CCUCUGAACACUAUUAUCU | A-104718.1 | AGAUAAUAGUGUUCAGAGG |
| AD-50493.1-UM | A-104639.1 | CAUGAAUCCCAUGUGCAUU | A-104640.1 | AAUGCACAUGGGAUUCAUG |
| AD-50494.1-UM | A-104655.1 | GAUGGAGGUAUUUAAGUUU | A-104656.1 | AAACUUAAAUACCUCCAUC |
| AD-50495.1-UM | A-104671.1 | GUAUCAGCCAAUCGCCUUU | A-104672.1 | AAAGGCGAUUGGCUGAUAC |
| AD-50496.1-UM | A-104687.1 | GGGUGUCCAAUAAGACCGA | A-104688.1 | UCGGUCUUAUUGGACACCC |
| AD-50497.1-UM | A-104703.1 | CAGCCCUGAAAAGUCCAAA | A-104704.1 | UUUGGACUUUUCAGGGCUG |
| AD-50498.1-UM | A-104641.1 | CCCAUGUGCAUUUACCGCU | A-104642.1 | AGCGGUAAAUGCACAUGGG |
| AD-50499.1-UM | A-104657.1 | GUAUUUAAGUUUGACACCA | A-104658.1 | UGGUGUCAAACUUAAAUAC |
| AD-50500.1-UM | A-104673.1 | GACAAAUCCCUUACCUUCA | A-104674.1 | UGAAGGUAAGGGAUUUGUC |
| AD-50501.1-UM | A-104689.1 | CUGUUCUGGUGCUGGUUAA | A-104690.1 | UUAACCAGCACCAGAACAG |
| AD-50502.1-UM | A-104705.1 | CCAAACUCCCAGGUAUUGU | A-104706.1 | ACAAUACCUGGGAGUUUGG |
| AD-50503.1-UM | A-104643.1 | CCCGCUUUGCUACCACUUU | A-104644.1 | AAAGUGGUAGCAAAGCGGG |
| AD-50505.1-UM | A-104675.1 | CUUACCUUCAAUGAGACCU | A-104676.1 | AGGUCUCAUUGAAGGUAAG |
| AD-50506.1-UM | A-104691.1 | CUGGUGCUGGUUAACACCA | A-104692.1 | UGGUGUUAACCAGCACCAG |
| AD-50507.1-UM | A-104707.1 | CAAACUCCCAGGUAUUGUU | A-104708.1 | AACAAUACCUGGGAGUUUG |
| AD-50508.1-UM | A-104645.1 | GCUUUGCUACCACUUUCUA | A-104646.1 | UAGAAAGUGGUAGCAAAGC |
| AD-50510.1-UM | A-104677.1 | CCUACCAGGACAUCAGUGA | A-104678.1 | UCACUGAUGUCCUGGUAGG |
| AD-50511.1-UM | A-104693.1 | GGUGCUGGUUAACACCAUU | A-104694.1 | AAUGGUGUUAACCAGCACC |
| AD-50512.1-UM | A-104709.1 | GCCGUUCGCUAAACCCCAA | A-104710.1 | UUGGGGUUUAGCGAACGGC |
| AD-50515.1-UM | A-104679.1 | GGACAUCAGUGAGUUGGUA | A-104680.1 | UACCAACUCACUGAUGUCC |
| AD-50516.1-UM | A-104695.1 | GUGCUGGUUAACACCAUUU | A-104696.1 | AAAUGGUGUUAACCAGCAC |
| AD-50517.1-UM | A-104711.1 | GCCUUUCCUGGUUUUUAUA | A-104712.1 | UAUAAAAACCAGGAAAGGC |
| AD-50518.1-UM | A-104719.1 | CUUUUGCUAUGACCAAGCU | A-104720.1 | AGCUUGGUCAUAGCAAAAG |
| AD-50523.1-UM | A-104721.1 | UGUACCAGGAAGGCAAGUU | A-104722.1 | AACUUGCCUUCCUGGUACA |
| AD-50528.1-UM | A-104723.1 | ACUAUUAUCUUCAUGGGCA | A-104724.1 | UGCCCAUGAAGAUAAUAGU |
| AD-50540.1-UM | A-104729.1 | UCAUGGGCAGAGUAGCCAA | A-104730.1 | UUGGCUACUCUGCCCAUGA |
| AD-50539.1-UM | A-104785.1 | CCAUUUACUUCAAGGGCCU | A-104786.1 | AGGCCCUUGAAGUAAAUGG |
| AD-50544.1-UM | A-104787.1 | UACUUCAAGGGCCUGUGGA | A-104788.1 | UCCACAGGCCCUUGAAGUA |
| AD-50549.1-UM | A-104789.1 | ACUUCAAGGGCCUGUGGAA | A-104790.1 | UUCCACAGGCCCUUGAAGU |
| AD-50514.1-UM | A-104663.1 | CGACUCUAUCGAAAAGCCA | A-104664.1 | UGGCUUUUCGAUAGAGUCG |
| AD-50522.1-UM | A-104779.1 | AACUGCCGACUCUAUCGAA | A-104780.1 | UUCGAUAGAGUCGGCAGUU |
| AD-50527.1-UM | A-104781.1 | ACUGCCGACUCUAUCGAAA | A-104782.1 | UUUCGAUAGAGUCGGCAGU |
| AD-50531.1-UM | A-104739.1 | GACUCUAUCGAAAAGCCAA | A-104740.1 | UUGGCUUUUCGAUAGAGUC |
| AD-50534.1-UM | A-104769.1 | UCUUCUUUGCCAAACUGAA | A-104770.1 | UUCAGUUUGGCAAAGAAGA |
| AD-50538.1-UM | A-104771.1 | UGCCAAACUGAACUGCCGA | A-104772.1 | UCGGCAGUUCAGUUUGGCA |
| AD-50543.1-UM | A-104773.1 | CCAAACUGAACUGCCGACU | A-104774.1 | AGUCGGCAGUUCAGUUUGG |
| AD-50553.1-UM | A-104777.1 | ACUGAACUGCCGACUCUAU | A-104778.1 | AUAGAGUCGGCAGUUCAGU |
| AD-50504.1-UM | A-104659.1 | GAACUGCCGACUCUAUCGA | A-104660.1 | UCGAUAGAGUCGGCAGUUC |
| AD-50509.1-UM | A-104661.1 | CUGCCGACUCUAUCGAAAA | A-104662.1 | UUUUCGAUAGAGUCGGCAG |
| AD-50529.1-UM | A-104751.1 | CUGGUUAACACCAUUUACU | A-104752.1 | AGUAAAUGGUGUUAACCAG |

TABLE 4
Modified Sense and antisense strand sequences of Serpinc1 dsRNAs (The “Sense
Sequence” column sequences are disclosed as SEQ ID NOs: 129-185, respectively,
in order of appearance, and the “Antisense Sequence” column sequences are
disclosed as SEQ ID NOs: 186-242, respectively, in order of appearance)

| | | | Antisense | |
|---|---|---|---|---|
| Duplex Name | Sense Name | Sense Sequence | Name | Antisense Sequence |
| AD-50475.1 | A-104633.1 | cccuGuGGAcAucuGcAcAdTsdT | A-104634.1 | UGUGcAGAUGUCcAcAGGGdTsdT |
| AD-50476.1 | A-104649.1 | cuAccAcuuucuAucAGcAdTsdT | A-104650.1 | UGCUGAuAGAAAGUGGuAGdTsdT |
| AD-50477.1 | A-104665.1 | cuAucGAAAAGccAAcAAAdTsdT | A-104666.1 | UUUGUUGGCUUUUCGAuAGdTsdT |
| AD-50478.1 | A-104681.1 | GGAcuucAAGGAAAAuGcAdTsdT | A-104682.1 | UGcAUUUUCCUUGAAGUCCdTsdT |
| AD-50479.1 | A-104697.1 | GuuAAcAccAuuuAcuucAdTsdT | A-104698.1 | UGAAGUAAAUGGUGUuAACdTsdT |
| AD-50480.1 | A-104713.1 | ccuGGuuuuuAuAAGAGAAdTsdT | A-104714.1 | UUCUCUuAuAAAAACcAGGdTsdT |
| AD-50481.1 | A-104635.1 | GAcAuucccAuGAAucccAdTsdT | A-104636.1 | UGGGAUUcAUGGGAAUGUCdTsdT |
| AD-50482.1 | A-104651.1 | cAccuGGcAGAuuccAAGAdTsdT | A-104652.1 | UCUUGGAAUCUGCcAGGUGdTsdT |
| AD-50483.1 | A-104667.1 | cGAAAAGccAAcAAAuccudTsdT | A-104668.1 | AGGAUUUGUUGGCUUUUCGdTsdT |
| AD-50484.1 | A-104683.1 | GAAAAuGcAGAGcAAuccAdTsdT | A-104684.1 | UGGAUUGCUCUGcAUUUUCdTsdT |
| AD-50485.1 | A-104699.1 | GGccuGuGGAAGucAAAGudTsdT | A-104700.1 | ACUUUGACUUCcAcAGGCCdTsdT |
| AD-50486.1 | A-104715.1 | GAAGuuccucuGAAcAcuAdTsdT | A-104716.1 | uAGUGUUcAGAGGAACUUCdTsdT |
| AD-50487.1 | A-104637.1 | ccAuGAAucccAuGuGcAudTsdT | A-104638.1 | AUGcAcAUGGGAUUcAUGGdTsdT |
| AD-50488.1 | A-104653.1 | cAAcuGAuGGAGGuAuuuAdTsdT | A-104654.1 | uAAAuACCUCcAUcAGUUGdTsdT |
| AD-50489.1 | A-104669.1 | ccAAGuuAGuAucAGccAAdTsdT | A-104670.1 | UUGGCUGAuACuAACUUGGdTsdT |
| AD-50490.1 | A-104685.1 | CGGccAucAAcAAAuGGGudTsdT | A-104686.1 | ACCcAUUUGUUGAUGGCCGdTsdT |
| AD-50491.1 | A-104701.1 | GAGGAcGGcuucAGuuuGAdTsdT | A-104702.1 | UcAAACUGAAGCCGUCCUCdTsdT |
| AD-50492.1 | A-104717.1 | ccucuGAAcAcuAuuAucudTsdT | A-104718.1 | AGAuAAuAGUGUUcAGAGGdTsdT |
| AD-50493.1 | A-104639.1 | cAuGAAucccAuGuGcAuudTsdT | A-104640.1 | AAUGcAcAUGGGAUUcAUGdTsdT |
| AD-50494.1 | A-104655.1 | GAuGGAGGuAuuuAAGuuudTsdT | A-104656.1 | AAACUuAAAuACCUCcAUCdTsdT |
| AD-50495.1 | A-104671.1 | GuAucAGccAAucGccuuudTsdT | A-104672.1 | AAAGGCGAUUGGCUGAuACdTsdT |
| AD-50496.1 | A-104687.1 | GGGuGuccAAuAAGAccGAdTsdT | A-104688.1 | UCGGUCUuAUUGGAcACCCdTsdT |
| AD-50497.1 | A-104703.1 | CAGcccuGAAAAGuccAAAdTsdT | A-104704.1 | UUUGGACUUUUcAGGGCUGdTsdT |
| AD-50498.1 | A-104641.1 | cccAuGuGcAuuuAccGcudTsdT | A-104642.1 | AGCGGuAAAUGcAcAUGGGdTsdT |
| AD-50499.1 | A-104657.1 | GuAuuuAAGuuuGAcAccAdTsdT | A-104658.1 | UGGUGUcAAACUuAAAuACdTsdT |
| AD-50500.1 | A-104673.1 | GAcAAAucccuuAccuucAdTsdT | A-104674.1 | UGAAGGuAAGGGAUUUGUCdTsdT |
| AD-50501.1 | A-104689.1 | cuGuucuGGuGcuGGuuAAdTsdT | A-104690.1 | UuAACcAGcACcAGAAcAGdTsdT |
| AD-50502.1 | A-104705.1 | ccAAAcucccAGGuAuuGudTsdT | A-104706.1 | AcAAuACCUGGGAGUUUGGdTsdT |
| AD-50503.1 | A-104643.1 | cccGcuuuGcuAccAcuuudTsdT | A-104644.1 | AAAGUGGuAGcAAAGCGGGdTsdT |
| AD-50505.1 | A-104675.1 | cuuAccuucAAuGAGAccudTsdT | A-104676.1 | AGGUCUCAUUGAAGGuAAGdTsdT |
| AD-50506.1 | A-104691.1 | cuGGuGcuGGuuAAcAccAdTsdT | A-104692.1 | UGGUGUuAACcAGcACcAGdTsdT |
| AD-50507.1 | A-104707.1 | CAAAcucccAGGuAuuGuudTsdT | A-104708.1 | AAcAAuACCUGGGAGUUUGdTsdT |
| AD-50508.1 | A-104645.1 | GcuuuGcuAccAcuuucuAdTsdT | A-104646.1 | uAGAAAGUGGuAGcAAAGCdTsdT |
| AD-50510.1 | A-104677.1 | ccuAccAGGAcAucAGuGAdTsdT | A-104678.1 | UcACUGAUGUCCUGGuAGGdTsdT |
| AD-50511.1 | A-104693.1 | GGuGcuGGuuAAcAccAuudTsdT | A-104694.1 | AAUGGUGUuAACcAGcACCdTsdT |
| AD-50512.1 | A-104709.1 | GccGuucGcuAAAccccAAdTsdT | A-104710.1 | UUGGGGUUuAGCGAACGGCdTsdT |
| AD-50515.1 | A-104679.1 | GGAcAucAGuGAGuuGGuAdTsdT | A-104680.1 | uACCAACUcACUGAUGUCCdTsdT |
| AD-50516.1 | A-104695.1 | GuGcuGGuuAAcAccAuuudTsdT | A-104696.1 | AAAUGGUGUuAACcAGcACdTsdT |
| AD-50517.1 | A-104711.1 | GccuuuccuGGuuuuuAuAdTsdT | A-104712.1 | uAuAAAAACcAGGAAAGGCdTsdT |
| AD-50518.1 | A-104719.1 | cuuuuGcuAuGAccAAGcudTsdT | A-104720.1 | AGCUUGGUcAuAGcAAAAGdTsdT |
| AD-50523.1 | A-104721.1 | uGuAccAGGAAGGcAAGuudTsdT | A-104722.1 | AACUUGCCUUCCUGGuAcAdTsdT |
| AD-50528.1 | A-104723.1 | AcuAuuAucuucAuGGGcAdTsdT | A-104724.1 | UGCCcAUGAAGAuAAuAGUdTsdT |
| AD-50540.1 | A-104729.1 | ucAuGGGcAGAGuAGccAAdTsdT | A-104730.1 | UUGGCuACUCUGCCcAUGAdTsdT |
| AD-50539.1 | A-104785.1 | ccAuuuAcuucAAGGGccudTsdT | A-104786.1 | AGGCCCUUGAAGuAAAUGGdTsdT |
| AD-50544.1 | A-104787.1 | uAcuucAAGGGccuGuGGAdTsdT | A-104788.1 | UCcAcAGGCCCUUGAAGuAdTsdT |
| AD-50549.1 | A-104789.1 | AcuucAAGGGccuGuGGAAdTsdT | A-104790.1 | UUCcAcAGGCCCUUGAAGUdTsdT |
| AD-50514.1 | A-104663.1 | cGAcucuAucGAAAAGccAdTsdT | A-104664.1 | UGGCUUUUCGAuAGAGUCGdTsdT |
| AD-50522.1 | A-104779.1 | AAcuGccGAcucuAucGAAdTsdT | A-104780.1 | UUCGAuAGAGUCGGcAGUUdTsdT |
| AD-50527.1 | A-104781.1 | AcuGccGAcucuAucGAAAdTsdT | A-104782.1 | UUUCGAuAGAGUCGGcAGUdTsdT |
| AD-50531.1 | A-104739.1 | GAcucuAucGAAAAGccAAdTsdT | A-104740.1 | UUGGCUUUUCGAuAGAGUCdTsdT |
| AD-50534.1 | A-104769.1 | ucuucuuuGccAAAcuGAAdTsdT | A-104770.1 | UUCAGUUUGGcAAAGAAGAdTsdT |
| AD-50538.1 | A-104771.1 | uGccAAAcuGAAcuGccGAdTsdT | A-104772.1 | UCGGcAGUUcAGUUUGGcAdTsdT |
| AD-50543.1 | A-104773.1 | ccAAAcuGAAcuGccGAcudTsdT | A-104774.1 | AGUCGGcAGUUcAGUUUGGdTsdT |
| AD-50553.1 | A-104777.1 | AcuGAAcuGccGAcucuAudTsdT | A-104778.1 | AuAGAGUCGGcAGUUcAGUdTsdT |
| AD-50504.1 | A-104659.1 | GAAcuGccGAcucuAucGAdTsdT | A-104660.1 | UCGAuAGAGUCGGcAGUUCdTsdT |
| AD-50509.1 | A-104661.1 | cuGccGAcucuAucGAAAAdTsdT | A-104662.1 | UUUUCGAuAGAGUCGGcAGdTsdT |
| AD-50529.1 | A-104751.1 | cuGGuuAAcAccAuuuAcudTsdT | A-104752.1 | AGuAAAUGGUGUuAACcAGdTsdT |

TABLE 5¹
Serpinc1 single dose screen

| | Human (Hep3B) | | Mouse (PMH) | |
|---|---|---|---|---|
| Duplex Name | 10 nM Ave | 0.1 nM Ave | 10 nM Ave | 0.1 nM Ave |
| AD-50475.1 | 0.11 | 0.21 | | |
| AD-50476.1 | 0.08 | 0.43 | | |
| AD-50477.1 | 0.10 | 0.10 | | |
| AD-50478.1 | 0.12 | 0.36 | | |
| AD-50479.1 | 0.24 | 0.84 | | |
| AD-50480.1 | 0.31 | 0.73 | | |
| AD-50481.1 | 0.74 | 1.12 | | |
| AD-50482.1 | 0.61 | 0.89 | | |
| AD-50483.1 | 0.07 | 0.14 | | |
| AD-50484.1 | 0.12 | 0.33 | | |
| AD-50485.1 | 0.58 | 1.18 | | |
| AD-50486.1 | 0.79 | 0.94 | | |
| AD-50487.1 | 0.05 | 0.09 | | |
| AD-50488.1 | 0.83 | 1.07 | | |
| AD-50489.1 | 0.09 | 0.28 | | |
| AD-50490.1 | 0.04 | 0.78 | | |
| AD-50491.1 | 0.19 | 0.77 | | |
| AD-50492.1 | 0.16 | 0.84 | | |
| AD-50493.1 | 0.17 | 0.55 | | |
| AD-50494.1 | 0.16 | 0.59 | | |
| AD-50495.1 | 0.08 | 0.13 | | |
| AD-50496.1 | 0.57 | 0.94 | | |
| AD-50497.1 | 0.85 | 1.15 | | |
| AD-50498.1 | 0.16 | 1.02 | | |
| AD-50499.1 | 0.10 | 0.21 | | |
| AD-50500.1 | 0.22 | 0.58 | | |
| AD-50501.1 | 0.10 | 0.32 | | |
| AD-50502.1 | 0.76 | 1.07 | | |
| AD-50503.1 | 0.08 | 0.47 | | |
| AD-50505.1 | 0.74 | 0.77 | | |
| AD-50506.1 | 0.85 | 0.89 | | |
| AD-50507.1 | 0.03 | 0.37 | | |
| AD-50508.1 | 0.16 | 0.97 | | |
| AD-50510.1 | 0.09 | 0.89 | | |
| AD-50511.1 | 0.15 | 0.71 | | |
| AD-50512.1 | 0.88 | 1.19 | | |
| AD-50515.1 | 0.13 | 0.49 | | |
| AD-50516.1 | 0.85 | 0.95 | | |
| AD-50517.1 | 0.14 | 0.59 | | |
| AD-50518.1 | 0.36 | 1.05 | | |
| AD-50523.1 | 0.03 | 0.66 | | |
| AD-50528.1 | 0.04 | 0.27 | | |
| AD-50540.1 | 0.14 | 0.37 | | |
| AD-50539.1 | 0.09 | 0.46 | 0.39 | 1.10 |
| AD-50544.1 | 0.23 | 0.75 | 0.36 | 1.07 |
| AD-50549.1 | 0.10 | 0.19 | 0.17 | 0.71 |
| AD-50514.1 | 0.12 | 0.48 | 0.19 | 0.95 |
| AD-50522.1 | 0.61 | 1.02 | 0.46 | 1.32 |
| AD-50527.1 | 0.06 | 0.15 | 0.08 | 0.45 |
| AD-50531.1 | 0.09 | 0.47 | 0.24 | 1.04 |
| AD-50534.1 | 0.05 | 0.10 | 0.11 | 0.55 |
| AD-50538.1 | 0.61 | 0.86 | 0.79 | 1.23 |
| AD-50543.1 | 0.40 | 1.04 | 0.49 | 1.23 |
| AD-50553.1 | 0.40 | 0.93 | 0.72 | 1.25 |
| AD-50504.1 | ND | ND | 0.92 | 1.25 |
| AD-50509.1 | ND | ND | 0.12 | 0.37 |
| AD-50529.1 | ND | ND | 0.23 | 0.47 |

¹Modified.

TABLE 6
Serpinc1 IC₅₀ Data

| | Hep3B IC₅₀ | PMH IC₅₀ |
|---|---|---|
| Duplex Name | (nM) | (nM) |
| AD-50487.1 | 0.003 | — |
| AD-50477.1 | 0.006 | — |
| AD-50483.1 | 0.011 | — |
| AD-50475.1 | 0.011 | — |
| AD-50495.1 | 0.017 | — |
| AD-50476.1 | 0.026 | — |
| AD-50499.1 | 0.027 | — |
| AD-50478.1 | 0.028 | — |
| AD-50489.1 | 0.029 | — |
| AD-50501.1 | 0.045 | — |
| AD-50507.1 | 0.052 | — |
| AD-50484.1 | 0.081 | — |
| AD-50515.1 | 0.185 | — |
| AD-50540.1 | 0.023 | — |
| AD-50528.1 | 0.056 | — |
| AD-50549.1 | 0.053 | ND |
| AD-50539.1 | 0.170 | ND |
| AD-50534.1 | 0.007 | ND |
| AD-50527.1 | 0.028 | ND |
| AD-50514.1 | 0.085 | ND |
| AD-50527.1 | ND | 0.019 |
| AD-50534.1 | ND | 0.011 |
| AD-50509.1 | ND | 0.006 |
| AD-50529.1 | ND | 0.021 |

[0452] A subset of siRNAs were also synthesized with 2′-OMe modifications, and duplexes of these siRNAs in lipofectamine formulations were used to transfect Hep3B cells. The results of the single dose screen of the modified duplexes are shown in Table 7.

TABLE 7
Lead Optimization (2′-OMe variants)

| Parent | Duplex ID | Ave 1 nM | Ave 0.1 nM | Ave 0.01 nM |
|---|---|---|---|---|
| AD-50477 | AD-50477.1 | 0.22 | 0.33 | 0.53 |
| AD-50477 | AD-55025.1 | 0.29 | 0.68 | 0.86 |
| AD-50477 | AD-55031.1 | 0.42 | 0.74 | 0.93 |
| AD-50477 | AD-55037.1 | 0.52 | 0.73 | 0.95 |
| AD-50477 | AD-55043.1 | 0.45 | 0.70 | 0.94 |
| AD-50477 | AD-55049.1 | 0.24 | 0.47 | 0.95 |
| AD-50477 | AD-55055.1 | 0.37 | 0.68 | 0.99 |
| AD-50477 | AD-55061.1 | 0.43 | 0.66 | 0.85 |
| AD-50477 | AD-55067.1 | 0.56 | 0.72 | 0.92 |
| AD-50477 | AD-55026.1 | 0.28 | 0.59 | 0.87 |
| AD-50477 | AD-55032.1 | 0.49 | 0.76 | 0.86 |
| AD-50477 | AD-55038.1 | 0.52 | 0.75 | 0.93 |
| AD-50477 | AD-55044.1 | 0.84 | 0.77 | 1.06 |
| AD-50487 | AD-50487.1 | 0.21 | 0.50 | 0.76 |
| AD-50487 | AD-55050.1 | 0.24 | 0.53 | 0.75 |
| AD-50487 | AD-55056.1 | 0.27 | 0.50 | 0.84 |
| AD-50487 | AD-55062.1 | 0.30 | 0.61 | 0.84 |
| AD-50487 | AD-55068.1 | 0.20 | 0.37 | 0.66 |
| AD-50487 | AD-55027.1 | 0.18 | 0.36 | 0.67 |
| AD-50487 | AD-55033.1 | 0.22 | 0.43 | 0.70 |
| AD-50487 | AD-55039.1 | 0.19 | 0.38 | 0.67 |
| AD-50487 | AD-55045.1 | 0.18 | 0.29 | 0.57 |
| AD-50487 | AD-55051.1 | 0.17 | 0.29 | 0.60 |
| AD-50487 | AD-55057.1 | 0.21 | 0.37 | 0.65 |
| AD-50487 | AD-55063.1 | 0.19 | 0.33 | 0.63 |
| AD-50487 | AD-55069.1 | 0.16 | 0.26 | 0.51 |
| AD-50509 | AD-50509.1 | 0.15 | 0.31 | 0.57 |
| AD-50509 | AD-55029.1 | 0.17 | 0.26 | 0.49 |
| AD-50509 | AD-55028.1 | 0.17 | 0.35 | 0.54 |
| AD-50509 | AD-55052.1 | 0.21 | 0.32 | 0.59 |
| AD-50509 | AD-55035.1 | 0.19 | 0.31 | 0.62 |
| AD-50509 | AD-55047.1 | 0.19 | 0.35 | 0.66 |
| AD-50509 | AD-55058.1 | 0.21 | 0.40 | 0.66 |
| AD-50509 | AD-55046.1 | 0.18 | 0.37 | 0.66 |
| AD-50509 | AD-55070.1 | 0.17 | 0.40 | 0.68 |
| AD-50509 | AD-55034.1 | 0.19 | 0.37 | 0.69 |
| AD-50509 | AD-55041.1 | 0.20 | 0.28 | 0.63 |
| AD-50509 | AD-55064.1 | 0.19 | 0.34 | 0.65 |
| AD-50509 | AD-55040.1 | 0.18 | 0.34 | 0.69 |
| AD-50534 | AD-50534.1 | 0.19 | 0.42 | 0.83 |
| AD-50534 | AD-55053.1 | 0.24 | 0.38 | 0.59 |
| AD-50534 | AD-55030.1 | 0.15 | 0.33 | 0.64 |
| AD-50534 | AD-55054.1 | 0.18 | 0.40 | 0.69 |
| AD-50534 | AD-55059.1 | 0.18 | 0.33 | 0.56 |
| AD-50534 | AD-55036.1 | 0.22 | 0.37 | 0.61 |
| AD-50534 | AD-55060.1 | 0.19 | 0.42 | 0.62 |
| AD-50534 | AD-55071.1 | 0.29 | 0.56 | 0.81 |
| AD-50534 | AD-55048.1 | 0.26 | 0.56 | 0.83 |
| AD-50534 | AD-55066.1 | 0.30 | 0.49 | 0.76 |
| AD-50534 | AD-55042.1 | 0.25 | 0.47 | 0.79 |
| AD-50534 | AD-55065.1 | 0.24 | 0.50 | 0.83 |

### Examples 3-4: Lead Optimization and In Vivo Testing

[0453] Table 8 is a detailed list of sequences of duplex siRNAs targeting Serpinc1 that were formulated as a lipid nanoparticle (LNP) (i.e., with MC3) or conjugated to GalNAc for lead optimization and in vivo delivery.

TABLE 8
Sense and antisense strand sequences of Serpincl dsRNAs for lead optimization (The “Sense
Sequence” column sequences are disclosed as SEQ ID NOs: 243-510, respectively, in order of
appearance, and the “Antisense Sequence” column sequences are disclosed as SEQ ID NOs:
511-778, respectively, in order of appearance)

| Duplex Name | Sense Mame | Sense Sequence | Antisense Name | Antisense Sequences |
|---|---|---|---|---|
| AD-50477.1 | A-104665.1 | cuAucGAAAAGccAAcAAAdTsdT | A-104666.1 | UUUGUUGGCUUUUCGAuAGdTsdT |
| AD-55025.1 | A-113301.1 | cuAucGAAAAGccAAcAAAdTdT | A-113302.1 | UUUGUUGGCUUUUcGAuAGdTdT |
| AD-55031.1 | A-113301.2 | cuAucGAAAAGccAAcAAAdTdT | A-113303.1 | UUUGUUGGCUUuUcGAuAGdTdT |
| AD-55087.1 | A-113301.3 | cuAucGAAAAGccAAcAAAdTdT | A-113304.1 | UUUGUUGGcUUuUcGAuAGdTdT |
| AD-55043.1 | A-113301.4 | cuAucGAAAAGccAAcAAAdTdT | A-113305.1 | UUUGuUGGcUUuUcGAuAGdTdT |
| AD-55049.1 | A-113305.1 | cuAucGAAAAGcCAAcAAAdTdT | A-113302.2 | UUUGUUGGCUUUUcGAuAGdTdT |
| AD-55055.1 | A-113306.2 | cuAucGAAAAGcCAAcAAAdTdT | A-113303.2 | UUUGUUGGCUUuUCGAuAGdTdT |
| AD-55061 1 | A-113305.3 | cuAucGAAAAGcCAAcAAAdTdT | A-113304.2 | UUUGUUGGcUUuUcGAuAGdTdT |
| AD-55067.1 | A-113305.4 | cuAucGAAAAGcCAAcAAAdTdT | A-113305.2 | UUUGuUGGcUUuUcGAuAGdTdT |
| AD-55026.1 | A-113307.1 | cuAucGAAAAGcCAACAAAdTdT | A-113302.3 | UUUGUUGGCUUUUcGAuAGdTdT |
| AD-55032 1 | A-113307.2 | cuAucGAAAAGcCAACAAAdTdT | A-113303.3 | UUUGUUGGCUUuUcGAuAGdTdT |
| AD-55038.1 | A-113307.3 | cuAucGAAAAGcCAACAAAdTdT | A-113304.3 | UUUGUUGGcUUuUcGAuAGdTdT |
| AD-55044 1 | A-113307.4 | cuAucGAAAAGcCAACAAAdTdT | A-113305.3 | UUUGuUGGcUUuUcGAuAGdTdT |
| AD-50487.1 | A-104637.1 | ccAuGAAucccAuGuGcAudTsdT | A-104638.1 | AUGcAcAUGGGAUUcAUGGdTdT |
| AD-55050.1 | A-113308.1 | ccAuGAAucccAuGuGcAudTdT | A-113309.1 | AUGcAcAUGGGAUUcAuGGdTdT |
| AD-55056 1 | A-113308.2 | ccAuGAAucccAuGuGcAudTdT | A-113310.1 | AUGCAcAUGGGAUUcAuGGdTdT |
| AD-55062.1 | A-113308.3 | ccAuGAAucccAuGuGcAudTdT | A-113311.1 | AUGCAcAUGGGAuUcAuGGdTdT |
| AD-55068.1 | A-113308.4 | ccAuGAAucccAuGuGcAudTdT | A-113312.1 | AUGCACAUGGGAuUcAuGgdTdT |
| AD-55027.1 | A-113313.1 | ccAuGAAucccAuGUGcAUdTdT | A-113309.2 | AUGcAcAUGGGAUUcAuGGdTdT |
| AD-55033.1 | A-113313.2 | ccAuGAAucccAuGUGcAUdTdT | A-113310.2 | AUGCAcAUGGGAUUcAuGGdTdT |
| AD-55039.1 | A-113313.3 | ccAuGAAucccAuGUGcAUdTdT | A-113311.2 | AUGCAcAUGGGAuUcAuGGdTdT |
| AD-55045.1 | A-113313.4 | ccAuGAAucccAuGUGcAUdTdT | A-113312.2 | AUGCACAUGGGAuUcAuGgdTdT |
| AD-55051.1 | A-113314.1 | ccAuGAAucCcAuGUGcAUdTdT | A-113309.3 | AUGcAcAUGGGAUUcAuGGdTdT |
| AD-55057.1 | A-113314.2 | ccAuGAAucCcAUGUGcAUdTdT | A-113310.3 | AUGCAcAUGGGAUUcAuGGdTdT |
| AD-55063.1 | A-113314.3 | ccAuGAAucCcAuGUGcAUdTdT | A-113311.3 | AUGCAcAUGGGAuUcAUGGdTdT |
| AD-55069.1 | A-113314.4 | ccAuGAAucCcAuGUGcAUdTdT | A-113312.3 | AUGCACAUGGGAuUcAuGgdTdT |
| AD-50509.1 | A-104661.1 | cuGccGAcucuAucGAAAAdTsdT | A-104662.1 | UUUUCGAuAGAGUCGGcAGdTsdT |
| AD-55029.1 | A-113321.1 | cuGccGAcuCuAuCGAaAAdTdT | A-113316.3 | UUUUCGAuAGAGUCGGcAgdTdT |
| AD-55028.1 | A-113315.1 | cuGccGAcucuAucGAAAAdTdT | A-113316.1 | UUUUCGAuAGAGUCGGcAgdTdT |
| AD-55052.1 | A-113320.1 | cuGccGAcuCuAuCGAAAAdTdT | A-113316.2 | UUUUCGAuAGAGUCGGcAgdTdT |
| AD-55035.1 | A-113321.2 | cuGccGAcuCuAuCGAaAAdTdT | A-113317.3 | UUUUCGAuAGAGUCgGcAgdTdT |
| AD-55047.1 | A-113321.4 | cuGccGAcuCuAuCGAaAAdTdT | A-113319.3 | UUuUCGAUAGAGUCgGcAgdTdT |
| AD-55058.1 | A-113320.2 | cuGccGAcuCuAuCGAAAAdTdT | A-113317.2 | UUUUCGAuAGAGUCgGcAgdTdT |
| AD-55046.1 | A-113315.4 | cuGccGAcucuAucGAAAAdTdT | A-113319.1 | UUuUCGAUAGAGUCgGcAgdTdT |
| AD-55070.1 | A-113320.4 | cuGccGAcuCuAuCGAAAAdTdT | A-113319.2 | UUuUCGAUAGAGUCgGcAgdTdT |
| AD-55034.1 | A-113315.2 | cuGccGAcucuAucGAAAAdTdT | A-113317.1 | UUuUCGAuAGAGUCgGcAgdTdT |
| AD-55041.1 | A-113321.3 | cuGccGAcuCuAuCGAaAAdTdT | A-113313.3 | UUuUCGAuAGAGUCgGcAgdTdT |
| AD-55064.1 | A-113320.3 | cuGccGAcuCuAuCGAAAAdTdT | A-113318.2 | UUuUCGAuAGAGUCgGcAgdTdT |
| AD-55040.1 | A-113315.3 | cuGccGAcucuAucGAAAAdTdT | A-113318.1 | UUuUCGAuAGAGUCgGcAgdTdT |
| AD-50534.1 | A-104769.1 | ucuucuuuGccAAAcuGAAdTsdT | A-104770.1 | UUcAGUUUGGcAAAGAAGAdTsdT |
| AD-55053.1 | A-113322.1 | ucuucuuuGccAAAcuGAAdTdT | A-113323.1 | UUcAGUUUGGcAAAGAAGadTdT |
| AD-55030.1 | A-113327.1 | ucuucuuuGcCAAACuGAAdTdT | A-133323.1 | UUcAGUUUGGcAAAGAAGadTdT |
| AD-55054.1 | A-113327.5 | ucuucuuuGcCAAACuGAAdTdT | A-113323.2 | UUCAGUUuGGvAAAGAAGadTdT |
| AD-55059.1 | A-113322.2 | ucuucuuuGccAAAcuGAAdTdT | A-113324.1 | UUcAGUUUGGcAAAgAAGadTdT |
| AD-55036.1 | A-113327.2 | ucuucuuuGcCAAACuGAAdTdT | A-113324.2 | UUcAGUUUGGcAAAgAAGadTdT |
| AD-55060.1 | A-113327.6 | ucuucuuuGcCAAACuGAAdTdT | A-113329.1 | UUCAGUUuGGcAAAgAAGadTdT |
| AD-55071.1 | A-113322.4 | ucuucuuuGccAAAcuGAAdTdT | A-113326.1 | UUcAGUUUGGCaAAgAAGadTdT |
| AD-55048.1 | A-113327.4 | ucuucuuuGcCAAACuGAAdTdT | A-113326.2 | UUcAGUUUGGCaAAgAAGadTdT |
| AD-55066.1 | A-113327.7 | ucuucuuuGcCAAACuGAAdTdT | A-113330.1 | UUCAGUUuGGcaAAgAAGadTdT |
| AD-55042.1 | A-113327.3 | ucuucuuuGcCAAACuGAAdTdT | A-113325.2 | UUcAGUUUGGcaAAgAAGadTdT |
| AD-55065.1 | A-113322.3 | ucuucuuuGccAAAcuGAAdTdT | A-133325.1 | UUcAGUUUGGcaAAgAAGadTdT |
| AD-54944.1 | A-113073.1 | GfgUfuAfaCfaCfCfAfuUfuAfcUfuCfaAfL96 | A-113074.1 | uUfgAfaGfuAfaAfuggUfgUfuAfaCfcsAfsg |
| AD-54951.1 | A-112997.1 | UfaGfuAfuCfaGfCfCfaAfuCfgCfcUfuUfL96 | A-112998.1 | aAfaGfgCfgAfuUfggcUfgAfuAfcUfasAfsc |
| AD-54942.1 | A-113041.1 | CfgCfuUfuGfcUfAfCfcAfcUfuUfcUfaUfL96 | A-113042.1 | aUfaGfaAfaGfuGfguaGfcAfaAfgCfgsGfsg |
| AD-54948.1 | A-113043.1 | CfuUfuGfcUfaCfCfAfcUfuUfcUfaUfcAfL96 | A-113044.1 | uGfaUfaGfaAfaGfuggUfaGfcAfaAfgsCfsg |
| AD-54957.1 | A-112999.1 | AfuCfgAfaAfaGfCfCfaAfcAfaAfuCfcUfL96 | A-113000.1 | aGfgAfuUfuGfuUfggcUfuUfuCfgAfusAfsg |
| AD-54933.1 | A-112991.1 | UfcCfcAfuGfaAfUfCfcCfaUfgUfgCfaUfL96 | A-112992.1 | aUfgCfaCfaUfgGfgauUfcAfuGfgGfasAfsu |
| AD-54962.1 | A-113079.1 | UfaAfgGfcAfuUfUfCfuUfgAfgGfuAfaAfL96 | A-113080.1 | uUfuAfcCfuCfaAfgaaAfuGfcCfuUfasUfsg |
| AD-54972.1 | A-113051.1 | GfcAfaCfuGfaUfGfGfaGfgUfaUfuUfaAfL96 | A-113052.1 | uUfaAfaUfaCfcUfccaUfcAfgUfuGfcsUfsg |
| AD-54949.1 | A-113059.1 | UfuUfaAfgUfuUfGfAfcAfcCfaUfaUfcUfL96 | A-113060.1 | aGfaUfaUfgGfuGfucaAfaCfuUfaAfasUfsa |
| AD-54936.1 | A-113039.1 | CfcAfuGfaAfuCfCfCfaUfgUfgCfaUfuUfL96 | A-113040.1 | aAfaUfgCfaCfaUfgggAfuUfcAfuGfgsGfsa |
| AD-54971.1 | A-113035.1 | UfgCfuGfgUfuAfAfCfaCfcAfuUfuAfcUfL96 | A-113036.1 | aGfuAfaAfuGfgUfguuAfaCfcAfgCfasCfsc |
| AD-54955.1 | A-113061.1 | UfcUfaUfcGfaAfAfAfgCfcAfaCfaAfaUfL96 | A-113062.1 | aUfuUfgUfuGfgCfuuuUfcGfaUfaGfasGfsu |
| AD-54953.1 | A-113029.1 | UfuCfcCfgCfuUfUfGfcUfaCfcAfcUfuUfL96 | A-113030.1 | aAfaGfuGfgUfaGfcaaAfgCfgGfgAfasUfsu |
| AD-54937.1 | A-113055.1 | GfaUfgGfaGfgUfAfUfuUfaAfgUfuUfgAfL96 | A-113056.1 | uCfaAfaCfuUfaAfauaCfcUfcCfaUfcsAfsg |
| AD-54967.1 | A-113065.1 | AfgAfcAfaAfuCfCfCfuUfaCfcUfuCfaAfL96 | A-113066.1 | uUfgAfaGfgUfaAfgggAfuUfuGfuCfusCfsc |
| AD-54935.1 | A-113023.1 | UfgCfuAfcCfaCfUfUfuCfuAfuCfaGfcafL96 | A-113024.1 | uGfcUfgAfuAfgAfaagUfgGfuAfgCfasAfsa |
| AD-54976.1 | A-113037.1 | UfgUfaUfuCfcAfAfUfgUfgAfuAfgGfaAfL96 | A-113038.1 | uUfcCfuAfuCfaCfauuGfgAfaUfaCfasUfsg |
| AD-54965.1 | A-113033.1 | AfaCfuGfcCfgAfCfUfcUfaUfcGfaAfaAfL96 | A-113034.1 | uUfuUfcGfaUfaGfaguCfgGfcAfgUfusCfsa |
| AD-54959 1 | A-113031.1 | GfcCfgAfcUfcUfAfUfcGfaAfaAfgCfcAfL96 | A-113032.1 | uGfgCfuUfuUfcGfauaGfaGfuCfgGfcsAfsg |
| AD-54943.1 | A-113057.1 | UfaUfuUfaAfgUfUfUfgAfcAfcCfaUfaUfL96 | A-113058.1 | aUfaUfgGfuGfuCfaaaCfuUfaAfaUfasCfsc |
| AD-54956.1 | A-113077.1 | UfgGfgCfcUfuGfUfCfgAfuCfuGfuUfcAfL96 | A-113078 1 | uGfaAfcAfgAfuCfgacAfaGfgCfcCfasUfsg |
| AD-54973.1 | A-113067.1 | CfaAfaUfcCfcUfUfAfcCfuUfcAfaUfgAfL96 | A-113068.1 | uCfaUfuGfaAfgGfuaaGfgGfaUfuUfgsUfsc |
| AD-54975.1 | A-113021.1 | UfcCfaAfaCfuCfCfCfaGfgUfaUfuGfuUfL96 | A-113022.1 | aAfcAfaUfaCfcUfgggAfgUfuUfgGfasCfsu |
| AD-54963.1 | A-113001.1 | GfaAfcUfgCfcGfAfCfuCfuAfuCfgAfaAfL96 | A-113002.1 | uUfuCfgAfuAfgAfgucGfgCfaGfuUfcsAfsg |
| AD-54978.1 | A-113069.1 | UfcAfaCfaAfaUfGfGfgUfgUfcCfaAfuAfL96 | A-113070.1 | uAfuUfgGfaCfaCfccaUfuUfgUfuGfasUfsg |
| AD-54952.1 | A-113013.1 | CfaCfuGfuUfcUfGfGfuGfcUfgGfuUfaAfL96 | A-113014.1 | uUfaAfcCfaGfcAfccaGfaAfcAfgUfgsAfsg |
| AD-54950.1 | A-113075.1 | GfgAfcGfgCfuUfCfAfgUfuUfgAfaGfgAfL96 | A-113076.1 | uCfcUfuCfaAfaCfugaAfgCfcGfuCfcsUfsc |
| AD-54964.1 | A-113017.1 | CfuGfgAfcUfuCfAfAfgGfaAfaAfuGfcAfL96 | A-113018.1 | uGfcAfuUfuUfcCfuugAfaGfuCfcAfgsGfsg |
| AD-54974.1 | A-113005 1 | AfgGfuAfuUfuLAfAGfuUfuGfaCfaCfcAfL96 | A-113006.1 | uGfgUfgUfcAfaAfcuuAfaAfuAfcCfusCfsc |
| AD-54969.1 | A-113006.1 | UfuAfcUfuCfaAfGfGfgCfcUtpUfgGfaAfL96 | A-113004.1 | uUfcCfaCfaGfgCfccuUfgAfaGfuAfasAfsu |
| AD-54961.1 | A-113063.1 | UfuUfuUfgGfaGfAfCfaAfaUfcCfcUfuAfL96 | A-113064.1 | uAfaGfgGfaUfuUfgucUfcCfaAfaAfasGfsg |
| AD-54968.1 | A-113061.1 | GfaUfuGfcUfgGfCfCfgUfuCfgCfuAfaAfL96 | A-113082.1 | uUfuAfgCfgAfaCfggcCfaGfcAfaUfcsAfsc |
| AD-54947.1 | A-113027.1 | CfcGfaCfuCfuAfUfCfgAfaAfaGfcCfaAfL96 | A-113028.1 | uUfgGfcUfuUfuCfgauAfgAfgUfcGfgsCfsa |
| AD-54941.1 | A-113025.1 | CfaCfcAfaUfuAfCfUfuCfaAfgGfgCfcUfL96 | A-113026.1 | aGfgCfcCfuUfgAfaguÅfaAfuGfgUfgsUfsu |
| AD-54966.1 | A-113849.1 | CfaAfgCfuGfgGfUfGfcCfuGfuAfaUfgAfL96 | A-113050.1 | uCfaUfuAfcAfgGfcacCfcAfgCfuUfgsGfsu |
| AD-54940.1 | A-113009.1 | AfcAfcUfaUfuAfUfCfuUfcAfuGfgGfcAfL96 | A-113018.1 | uGfcCfcAfuGfaAfgauAfaUfaGfuGfusUfsc |
| AD-54958.1 | A-113015.1 | AfgGfaAfaAfuGfCfAfgAfgCfaAfuCfcAfL96 | A-113016.1 | uGfgAfuUfgCfuCfugcAfuUfuUfcCfusUfsg |
| AD-54938.1 | A-113071.1 | UfcUfgGfuGfcUfGfGfuUfaAfcAfcCfaUfL96 | A-113072.1 | aUfgGfuGfuUfaAfccaGfcAfcCfaGfasAfsc |
| AD-54934.1 | A-113007.1 | AfgCfcCfuGfuGfGfAfcAfuCfuGfcAfcAfL96 | A-113008.1 | uGfuGfcAfgAfuGfuccAfcAfgGfgCfusCfsc |
| AD-54939.1 | A-112993.1 | CfuUfcUfuCfuUfUfGfcCfaAfaCfuGfaAfL96 | A-112994.1 | uUfcAfgUfuUfgGfcaaAfgAfaGfaAfgsUfsg |
| AD-54960.1 | A-113047.1 | UfcUfcCfaCfgGfCfUfuUfuGfcUfaUfgAfL96 | A-113048.1 | uCfaUfaGfcAfaAfagcCfgUfgGfaGfasUfsa |
| AD-54954.1 | A-113045.1 | GfcAfcCfuGfgCfAfGfaUfuCfcAfaGfaAfL96 | A-113046.1 | uUfcUfuGfgAfaUfcugCfcAfgGfuGfcsUfsp |
| AD-54970.1 | A-113019.1 | CfuUfcAfuGfgGfCfAfgAfgUfaGfcCfaAfL96 | A-113020.1 | uUfgGfcUfaCfuCfugcCfcAfuGfaAfgsAfsu |
| AD-54946.1 | A-113011.1 | CfuCfcAfaGfuUfAfGfuAfuCfaGfcCfaAfL96 | A-113012.1 | uUfgGfcUfgAfuAfcuaAfcUfuGfgAfgsGfsa |
| AD-56331.1 | A-113073.4 | GfgUfuAfaCfaCfCfAfuUfuAfcUfuCfaAfL96 | A-115852.1 | UUfgAfaGfuAfaAfuggUfgUfuAfaCfcsAfsg |
| AD-56337.1 | A-115853.1 | GfguuAfaCfaCfCfAfuUfuAfcUfuCfaAfL96 | A-113074.4 | uUfgAfaGfuAfaAfuggUfgUfuAfaCfcsAfsg |
| AD-56343.1 | A-115854.1 | GfguuAfaCfaCfCfAfuUfuAfcUfuCfaaL96 | A-113074.5 | uUfgAfaGfuAfaAfuggUfgUfuAfaCfcsAfsg |
| AD-56349.1 | A-115855.1 | GfguuAfaCfaCfCfAfuUfuacUfuCfaaL96 | A-113074.6 | uUfgAfaGfuAfaAfuggUfgUfuAfaCfcsAfsg |
| AD-56355.1 | A-115856.1 | GfguuAfaCfaCfCfAfuUfuAfcuucaaL96 | A-113074.7 | uUfgAfaGfuAfaAfuggUfgUfuAfaCfcsAfsg |
| AD-56361.1 | A-115857.1 | GfguuAfacaCfCfAfuUfuacUfucaaL96 | A-113074.8 | uUfgAfaGfuAfaAfuggUfgUfuAfaCfcsAfsg |
| AD-56367.1 | A-115858.1 | GfguuAfacaCfCfAfuuuacUfucaaL96 | A-113074.9 | uUfgAfaGfuAfaAfuggUfgUfuAfaCfcsAfsg |
| AD-56326.1 | A-115859.1 | GfguuAfacaCfCfAfuuuacuucaaL96 | A-113074.10 | uUfgAfaGfuAfaAfuggUfgUfuAfaCfcsAfsg |
| AD-56332.1 | A-115860.1 | GfguuaacaCfCfAfuuuacuucaaL96 | A-113074.11 | uUfgAfaGfuAfaAfuggUfgUfuAfaCfcsAfsg |
| AD-56338.1 | A-113073.5 | GfgUfuAfaCfafCfCfAfuUfuAfcUfuCfaAfL96 | A-115861.1 | uUfgaaGfuAfaAfuggUfgUfuAfaCfcsasg |
| AD-56344.1 | A-115853.2 | GfguuAfaCfaCfCfAfuUfuAfcUfuCfaAfL96 | A-115861.2 | uUfgaaGfuAfaAfuggUfgUfuAfaCfcsasg |
| AD-56350.1 | A-115854.2 | GfguuAfaCfaCfCfAfuUfuAfcUfuCfaaL96 | A-115861.3 | uUfgaaGfuAfaAfuggUfgUfuAfaCfcsasg |
| AD-56356.1 | A-115855.2 | GfguuAfaCfaCfCfAfuUfuacUfuCfaaL96 | A-115861.4 | uUfgaaGfuAfaAfuggUfgUfuAfaCfcsasg |
| AD-56362.1 | A-115856.2 | GfguuAfaCfaCfCfAfuUfuAfcuucaaL96 | A-115861.5 | uUfgaaGfuAfaAfuggUfgUfuAfaCfcsasg |
| AD-56368.1 | A-115857.2 | GfguuAfacaCfCfAfuUfuacUfucaaL96 | A-115861.6 | uUfgaaGfuAfaAfuggUfgUfuAfaCfcsasg |
| AD-56327.1 | A-115858.2 | GfguuAfacaCfCfAfuuuacUfucaaL96 | A-115861.7 | uUfgsaGfuAfaAfuggUfgUfuAfaCfcsasg |
| AD-56333.1 | A-115859.2 | GfguuAfacaCfCfAfuuuacuucaaL96 | A-115861.8 | uUfgaaGfuAfaAfuggUfgUfuAfaCfcsasg |
| AD-56399.1 | A-115860.2 | GfguuaacaCfCfAfuuuacuucaaL96 | A-115861.9 | uUfgaaGfuAfaAfuggUfgUfuAfaCfcsasg |
| AD-56345.1 | A-113073.6 | GfgUfuAfaCfaCfCfAfuUfuAfcUfuCfaAfL96 | A-115862.1 | uUfgaaGfuAfaAfuggUfguuAfaCfcsasg |
| AD-56351.1 | A-115853.3 | GfguuAfaCfaCfCfAfuUfuAfcUfuCfaAfL96 | A-115852.2 | uUfgaaGfuAfaAfuggUfguuAfaCfcsasg |
| AD-56357.1 | A-115854.3 | GfguuAfaCfaCfCfAfuUfuAfcUfuCfaaL96 | A-115862.3 | uUfgaaGfuAfaAfuggUfguuAfaCfcsasg |
| AD-56363.1 | A-115855.3 | GfguuAfaCfaCfCfAfuUfuacUfuCfaaL96 | A-115862.4 | uUfgaaGfuAfaAfuggUfguuAfaCfcsasg |
| AD-55369.1 | A-115856.3 | GfguuAfaCfaCfCfAfuUfuAfcuucaaL96 | A-115852.5 | uUfgaaGfuAfaAfuggUfguuAfaCfcsasg |
| AD-55328.1 | A-115857.3 | GfguuAfacaCfCfAfuUfuacUfucaaL96 | A-115852.6 | uUfgaaGfuAfaAfuggUfguuAfaCfcsasg |
| AD-56534.1 | A-115858.3 | GfguuAfacaCfCfAfuuuacUfucaaL96 | A-115862.7 | uUfgaaGfuAfaAfuggUfguuAfaCfcsasg |
| AD-56340.1 | A-115859.3 | GfguuAfacaCfCfAfuuuacuucaaL96 | A-115862.8 | uUfgaaGfuAfaAfuggUfguuAfaCfcsasg |
| AD-55346.1 | A-115860.3 | GfguuaacaCfCfAfuuuacuucaaL96 | A-125862.9 | uUfgaaGfuAfaAfuggUfguuAfaCfcsasg |
| AD-56352.1 | A-115863.1 | GfgUfUfAfaCfaCfCfAfuUfuAfcUfuCfaAfL96 | A-113074.12 | uUfgAfaGfuAfaAfugpUfgUfuAfaCfcsAfsg |
| AD-56358.1 | A-115854.1 | GfgUfufAfaCfaCfCfAfuUfUfAfcUfuCfaAfL96 | A-113074.13 | uufgAfaGfuAfaAfuggUfgUfuAfaCfcsAfsg |
| AD-56364.1 | A-115865.1 | GfgUfUfAfaCfaCfCfAfuUfUfAfcUfUfCfaAfL96 | A-113074.14 | uUfgAfaGfuAfaAfuggUfgUfuAfaCfcsAfsg |
| AD-55370.1 | A-115866.1 | GfgUfUfAfAfCfaCfCfAfuUfUfAfcUfUfCfAfAfL96 | A-113074.15 | uUfgAfaGfuAfaAfuggUfgUfuAfaCfcsAfsg |
| AD-56329.1 | A-115867.1 | GfGfUfUfAfAfCfaCfCfAfuUfufAfcUfUfCFAfAfL96 | A-113074.16 | uUfgAfaGfuAfaAfuggUfgUfuAfaCfcsAfsg |
| AD-56335.1 | A-115858.1 | GfGfUfUfAfAfCfaCfCfAfuUfUfAfCfUfUfCfAfAfL96 | A-113074.17 | uUfgAfaGfuAfaAfuggUfgUfuAfaCfcsAfsg |
| AD-56341.1 | A-115869.1 | GfGfUfUfAfAfCfAfCfCfAfuUfUfAfCfUfUfCfAfAfL96 | A-113074.18 | uUfgAfaGfuAfaAfuggUfgUfuAfaCfcsAfsg |
| AD-56347.1 | A-115868.2 | GfGfUfUfAfAfCfaCfCfAfuUfUfAfCFUfUfCfAfAfL96 | A-115870.1 | uUfgaaGfuAfaAfuggUfgUfuaaCfcsasg |
| AD-56353.1 | A-115868.3 | GfGfUfUfAfAfCfaCfCfAfuUfufAfCfUfUfCfAfAfL96 | A-115871.1 | uUfgAaGfuAfaAfuggUfgUfuaaCfcsasg |
| AD-55359.1 | A-115868.4 | GfGfUfUfAfAfCfaCfCfAfuUfUfAfCfUfUfCfAfAfL96 | A-115872.1 | uUfgAaGfuaaAfuggUfgUfuaaCfcsasg |
| AD-56365.1 | A-115868.5 | GfGfUfUfAfAfCfaCfCfAfuUfUfAFCfUfUfCfAfAfL96 | A-115873.1 | uUfgAaGfuAaAfuggUfgUfuaaCfcsasg |
| AD-56371.1 | A-115868.6 | GfGfUfUfAfAfCfaCfCfAfuUfUfAfCfUfUfCfAfAfL96 | A-115874.1 | uUfgAaguAaAfuggUfgUfuaaCfcsasg |
| AD-55330.1 | A-115868.7 | GfGfUfUfAfAfCfaCfCfAfuUfufAfCfUFUfCfAfAfL96 | A-115875.1 | uUfgAaGuAaAfuggUfgUfuaaCfcsasg |
| AD-56336.1 | A-115868.8 | GfGfUfUfAfAfCfaCfCfAfuUfUfAfCfUFUfCfAfAfL96 | A-115876.1 | uUgAaguAaAfuggUfgUfuaaCfcsasg |
| AD-56342.1 | A-115868.9 | GfGfUfUfAfAfCfaCfCfAfuUfUfAfCfUfUfCfAfAfL96 | A-115877.1 | uUgAaGuAaAfuggUfgUfuaaCfcsasg |
| AD-58348.1 | A-115868.10 | GfGfUfUfAfAfCfaCfCfAfuUfUfAfCfUfUfCfAfAfL96 | A-115861.10 | uUfgaaGfuAfaAfuggUfgUfuAfaCfcsasg |
| AD-56354.1 | A-115868.11 | GfGfUfUfAfAfCfaCfCfAfuUfUfAfCfUfUfCfAfAfL96 | A-115878.1 | uUfgAaGfuAfaAfuggUfgUfuAfaCfcsasg |
| AD-56360.1 | A-115868.12 | GfGfufufAfAfCfaCfCfAfuUfUfAfCfUfUfCfAfAfL96 | A-115879.1 | uUfgAaGfusaAfuggUfgUfuAfaCfcsasg |
| AD-55366.1 | A-115868.13 | GfGfUfUfAfAfCfaCfCfAfuUfUfAfCfUfUfCfAfAfL96 | A-115880.1 | uUfgAaGfuAaAfuggUfgUfuAfaCfcsasg |
| AD-56372.1 | A-115868.14 | GfGfUfUfAfAfCfaCfCfAfuUfUfAfCfUfUfCfAfAfL96 | A-115881.1 | uUfgAaguAaAfuggUfgUfuAfaCfcsasg |
| AD-56378.1 | A-115868.15 | GfGfUfUfAfAfCfaCfCfAfuUfUfAfCfUfUfCfAfAfL96 | A-115882.1 | uUfgAaGuAaAfuggUfgUfuAfaCfcsasg |
| AD-56384.1 | A-115868.16 | GfGfUfUfAfAfCfaCfCfAfuUfUfAfCfUfUfCfAfAfL96 | A-115883.1 | uUgAaguAsAfuggUfgUfuAfaCfcsasg |
| AD-56390.1 | A-115868.17 | GfGfUfUFAfAfCfaCfCfAfuUfUfAfCfUfUfCfAfAfL96 | A-115884.1 | uUgAaGuAaAfuggUfgUfuAfaCfcsasg |
| AD-56396.1 | A-113073.7 | GfgUfuAfaCfaCfCfAfuUfuAfcUfuCfaAfL96 | A-115885.1 | uUfgAfAfGfuAfaAfuggUfgUfUfAfaCfcsAfsg |
| AD-56402.1 | A-115863.2 | GfgUfUfAfaCfaCfCfAfuUfuAfcUfuCfaAfL96 | A-115885.2 | DUfgAfAfGfuAfaAfuggUfgUfUfAfaCfcsAfsg |
| AD-56408.1 | A-115864.2 | GfgUfUfAfaCfaCfCfAfuUfUfAfcUfuCfaAfL96 | A-115885.3 | uUfgAfAfGfuAfaAfuggUfgUfUfAfaCfcsAfsg |
| AD-56414.1 | A-115865.2 | GfgUfUfAfaCfaCfCfAfuUfUfAfcUfUfCfaAfL96 | A-115885.4 | DUfgAfAfGfuAfaAfuggUfgUfUfAfaCfcsAfsg |
| AD-56373.1 | A-115886.1 | GfgUfUfAfaCfaCfCfAfuUfUfAfcUfUfCfAfAfL96 | A-115885.5 | uUfgAfAfGfuAfaAfuggUfgUfUfAfaCfcsAfsg |
| AD-56379.1 | A-115866.2 | GfgUfUfAfAfCfaCfCfAfuUfUfAfcufUfCfAfAfL96 | A-115885.6 | LUfgAfAfGfuAfaAfuggUfgUfUfAfaCfcsAfsg |
| AD-56385.1 | A-115867.2 | GfGfUfUfAfAfCfaCfCfAfuUfUfAfcUfUfCfAfAfL96 | A-115885.7 | uUfgAfAfGfuAfaAfuggUfgUfUfAfaCfcsAfsg |
| AD-56391.1 | A-115868.18 | GfGfUfUfAfAfCfaCfCfAfuUfUfAfCfUfUfCfAfAfL96 | A-115885.8 | uUfgAfAfGfuAfaAfuggUfgUfUfAfaCfcsAfsg |
| AD-56397.1 | A-115869.2 | GfGfUfUfAfAfCfAfCfCfAfuUfUfAfCfUfUfCfAfAfL96 | A-115885.9 | uUfgAfAfGfuAfaAfuggUfgUfUfAfaCfcsAfsg |
| AD-56403.1 | A-113073.8 | GfgUfuAfaCfaCfCfAfuUfuAfcUfuCfaAfL96 | A-115887.1 | uUfgAfAfGfufAfaAfuggUfgUfUfAfaCfcsAfsg |
| AD-56409.1 | A-115863.3 | GfgUfUfAfaCfaCfCfAfuUfuAfcUfuCfaAfL96 | A-115887.2 | uUfgAfAfGfUfAfaAfuggUfgUfUfAfaCfcsAfsg |
| AD-56415.1 | A-115864.3 | GfgUfUfAfaCfaCfCfAfuUfUfAfcUfuCfaAfL96 | A-115887.3 | uUfgAfAfGfUfAfaAfuggUfgUfUfAfaCfcsAfsg |
| AD-56374.1 | A-115865.3 | GfgUfUfAfaCfaCfCfAfuUfUfAfcUfUfCfaAfL96 | A-115887.4 | uUfgAfAfGfUfAfaAfuggUfgUfUfAfaCfcsAfsg |
| AD-56380.1 | A-115886.2 | GfgUfUfAfaCfaCfCfAfuUfUfAfcUfUfCfAfAfL96 | A-115887.5 | uUfgAfAfGfufAfaAfuggUfgUfUfAfaCfcsAfsg |
| AD-56386.1 | A-115866.3 | GfgUfUfAfAfCfaCfCfAfuUfUfAfcUfUfCfAfAfL96 | A-115887.6 | uUfgAfAfGfufAfaAfuggUfgUfUfAfaCfcsAfsg |
| AD-56392.1 | A-115867.3 | GfGfUfufAfAfCfaCfCfAfuUfufAfcUfUfCfAfAfL96 | A-115887.7 | uUfgAfAfGfufAfaAfuggUfgUfUfAfaCfcsAfsg |
| AD-55398.1 | A-115868.19 | GfGfUfUfAfAfCfaCfCfAfuUfUfAfCIUffCfAfAfL96 | A-115887.8 | uUfgAfAfGfUfAfaAfuggUfgUfUfAfaCfcsAfsg |
| AD-56404.1 | A-115869.3 | GfGfUfUfAfAfCfAfCfCfAfuUfUfAfCIUffCfAfAfL96 | A-115887.9 | uUfgAfAfGfUfAfaAfuggUfgUfUfAfaCfcsAfsg |
| AD-56410.1 | A-115888.1 | GfgUfuAfaCfaCfCfAfuUfuAfcUfUfCfAfAfL96 | A-113074.19 | uUfgAfaGfuAfaAfuggUfgUfuAfaCfcsAfsg |
| AD-56416.1 | A-115889.1 | GfgUfuAfaCfaCfCfAfuUfuAfCfufUfCfaAfL96 | A-113074.20 | uUfgAfaGfuAfaAfuggUfgUfuAfaCfcsAfsg |
| AD-56375.1 | A-115890.1 | GfgUfuAfaCfaCfCfAfuUfUfAfCfUfuCfaAfL96 | A-113074.21 | uUfgAfaGfuAfaAfuggUfgUfuAfaCfcsAfsg |
| AD-56381.1 | A-115891.1 | GfgUfuAfaCfaCfCfAfUfUfUfAfcUfuCfaAfL96 | A-113074.22 | uUfgAfaGfuAfaAfuggUfgUfuAfaCfcsAfsg |
| AD-56387.1 | A-115892.1 | GfgUfuAfaCfAfCfCfAfUfUfuAfcUfuCfaAfL96 | A-113074.23 | uUfgAfaGfuAfaAfuggUfgUfuAfaCfcsAfsg |
| AD-56393.1 | A-115893.1 | GfgUfuAfAfCfAfCfCfAfuUfuAfcUfuCfaAfL96 | A-113074.24 | uUfgAfaGfuAfaAfuggUfgUfuAfaCfcsAfsg |
| AD-56399.1 | A-115894.1 | GfgUfUfAfAfCfaCfCfAfuUfuAfcUfuCfaAfL96 | A-113074.25 | uUfgAfaGfuAfaAfuggUfgUfuAfaCfcsAfsg |
| AD-56405.1 | A-115895.1 | GfGfUfUfAfaCfaCfCfAfuUfuAfcUfuCfaAfL96 | A-113074.26 | uUfgAfaGfuAfaAfuggUfgUfuAfaCfcsAfsg |
| AD-56411.1 | A-115896.1 | GfgUfuAfaCfaCfCfAfuUfuAfcUfucaaL96 | A-113074.27 | uUfgAfaGfuAfaAfuggUfgUfuAfaCfcsAfsg |
| AD-56417.1 | A-115897.1 | GfgUfuAfaCfaCfCfAfuUfuAfcuucaAfL96 | A-113074.28 | uUfgAfaGfuAfaAfuggUfgUfuAfaCfcsAfsg |
| AD-56376.1 | A-115898.1 | GfgUfuAfaCfaCfCfAfuUfuacuuCfaAfL96 | A-113074.29 | uUfgAfaGfuAfaAfuggUfgUfuAfaCfcsAfsg |
| AD-56382.1 | A-115899.1 | GfgUfuAfaCfaCfCfAfuuuacUfuCfaAfL96 | A-113074.30 | uUfgAfaGfuAfaAfuggUfgUfuAfaCfcsAfsg |
| AD-56388.1 | A-115900.1 | GfgUfuAfaCfaCfcauauAfcUfuCfaAfL96 | A-113074.31 | uUfgAfaGfuAfaAfuggUfgUfuAfaCfcsAfsg |
| AD-56394.1 | A-115901.1 | GfgUfuAfaCfaccauUfuAfcUfuCfaAfL96 | A-113074.32 | uUfgAfaGfuAfaAfuggUfgUfuAfaCfcsAfsg |
| AD-56400.1 | A-115902.1 | GfgUfuAfacaccAfuUfuAfcUfuCfaAfL96 | A-113074.33 | uUfgAfaGfuAfaAfuggUfgUfuAfaCfcsAfsg |
| AD-56406.1 | A-115903.1 | GfgUfuAfacaCfCfAfuuuAfcUfuCfaAfL96 | A-113074.34 | uUfgAfaGfuAfaÅfuggUfgUfuAfaCfcsAfsg |
| AD-56412.1 | A-115904.1 | GfgUfuaacaCfCfAfuUfuAfcUfuCfaAfL96 | A-113074.35 | uUfgAfaGfuAfaAfuggUfgUfuAfaCfcsAfsg |
| AD-56418.1 | A-115905.1 | GfguuaaCfaCfCfAfuUfuAfcUfuCfaAfL96 | A-113074.36 | uUfgAfaGfuAfaAfuggUfgUfuAfaCfcsAfsg |
| AD-56377.1 | A-115906.1 | gguuAfaCfaCfCfAfuUfuAfcUfuCfaAfL96 | A-113074.37 | uUfgAfaGfuAfaAfuggUfgUfuAfaCfcsAfsg |
| AD-56383.1 | A-113073.9 | GfgUfuAfaCfaCfCfAfuUfuAfcUfuCfaAfL96 | A-115907.1 | UfUfGfAfaGfuAfaAfuggUfgUfuAfaCfcsAfsg |
| AD-56389.1 | A-113073.10 | GfgUfuAfaCfaCfCfAfuUfuAfcUfuCfaAfL96 | A-115908.1 | uUfGfAfAfGfuAfaAfuggUfgUfuAfaCfcsAfsg |
| AD-56395.1 | A-113073.11 | GfgUfuAfaCfaCfCfAfuUfuAfcUfuCfaAfL96 | A-115909.1 | uUfgAfAfGfUfAfaAfuggUfgUfuAfaCfcsAfsg |
| AD-56401.1 | A-113073.12 | GfgUfuAfaCfaCfCfAfuUfuAfcUfuCfaAfL96 | A-115910.1 | uUfgAfaGfUfAfAfAfuggUfgUfuAfaCfcsAfsg |
| AD-56407.1 | A-113073.13 | GfgUfuAfaCfaCfCfAfuUfuAfcUfuCfaAfL96 | A-115911.1 | uUfgAfaGfuAfAfAfUfGfgUfgLIfuAfaCfcsAfsg |
| AD-56413.1 | A-113073.14 | GfgUfuAfaCfaCfCfAfuUfuAfcUfuCfaAfL96 | A-115912.1 | uUfgAfaGfuAfaAfUfGfGfUfgUfuAfaCfcsAfsg |
| AD-56419.2 | A-113073.15 | GfgUfuAfaCfaCfCfAfuUfuAfcUfuCfaAfL96 | A-115913.1 | uUfgAfaGfuAfaAfuGfGfUfGfUfuAfaCfcsAfsg |
| AD-56425.2 | A-113073.16 | GfgUfuAfaCfaCfCfAfuUfuAfcUfuCfaAfL96 | A-115914.1 | uUfgAfaGfuAfAfAfuggUfGfUfuAfaCfcsAfsg |
| AD-56431.2 | A-113073.17 | GfgUfuAfaCfaCfCfAfuUfuAfcUfuCfaAfL96 | A-115915.1 | uUfgAtaGfuAfaAfuggUfGfUfUfAfaCfcsAfsg |
| AD-56436.2 | A-113073.18 | GfgUfuAfaCfaCfCfAfuUfuAfcUfuCfaAfL96 | A-115916.1 | uUfgAfaGfuAfaAfuggUfgUfUfAfAfCfcsAfsp |
| AD-56442.2 | A-113073.19 | GfgUfuAfaCfaCfCfAfuUfuAfcUfuCfaAfL96 | A-115917.1 | uUfgAfaGfuAfaAfuggUfgUfuAfAfCfCfsAfsg |
| AD-56448.2 | A-113073.20 | GfgUfuAfaCfaCfCfAfuUfuAfcUfuCfaAfL96 | A-115918.1 | uUfgAfaGfuAfaAfuggUfgUfuAfaCfCfsAfsGf |
| AD-56454.2 | A-113073.21 | GfgUfuAfaCfaCfCfAfuUfuAfcUfuCfaAfL96 | A-115919.1 | uugaaGfuAfaAfuggUfgUfuAfaCfcsAfsg |
| AD-56460.2 | A-113073.22 | GfgUfuAfaCfaCfCfAfuUfuAfcUfuCfaAfL96 | A-115920.1 | uUfgaaguAfaAfuggUfgUfuAfaCfcsAfsg |
| AD-56420.2 | A-113073.23 | GfgUfuAfaCfaCfCfAfuUfuAfcUfuCfaAfL96 | A-115921.1 | uUfgAfaguaaAfuggUfpUfuAfaCfcsAfsa |
| AD-56426.2 | A-113073.24 | GfgUfuAfaCfaCfCfAfuUfuAfcUfuCfaAfL96 | A-115922.1 | uUfgAfaGfuaaauggUfgUfuAfaCfcsAfsg |
| AD-56432.2 | A-113073.25 | GfgUfuAfaCfaCfCfAfuUfuAfcUfuCfaAfL96 | A-115923.1 | uUfgAfaGfuAfaauggugUfuAfaCfcsAfsg |
| AD-56437.2 | A-113073.26 | GfgUfuAfaCfaCfCfAfuUfuAfcUfuCfaAfL96 | A-115924.1 | uUfgAfaGfuAfaAfugguguaAfaCfcsÅfsg |
| AD-56443.2 | A-113073.27 | GfgUfuAfaCfaCfCfAfuUfuAfcUfuCfaAfL96 | A-115925.1 | uUfgAfaGfuAfaAfuggUfguuaaCfcsAfsp |
| AD-56449.2 | A-113073.28 | GfgUfuAfaCfaCfCfAfoUfuAfcUfuCfaAfL96 | A-115926.1 | uUfgAfaGfuAfaAfuggUfgUfuaaccsAfsg |
| AD-56455.2 | A-113073.29 | GfgUfuAfaCfaCfCfAfuUfuAfcUfuCfaAfL96 | A-115927.1 | uUfgAfaGfuAfaAfuggUfgUfuAfaccsasg |
| AD-56461.2 | A-115888.2 | GfgUfuAfaCfaCfCFAfuUfuAfcUfUfCFAfAfL96 | A-115919.2 | uugaaGfuAfaAfuggUfgUfuAfaCfcsAfsg |
| AD-56421.2 | A-115889.2 | GfgUfuAfaCfaCfCfAfuUfuAfCfUfUfCfaAfL96 | A-115920.2 | uUfgaaguAfaAfuggufgUfuAfaCfcsAfsg |
| AD-56427.2 | A-115890.2 | GfgUfuAfaCfaCfCfAfuUfUfAfCfUfuCfaAfL96 | A-115921.2 | uUfgAfaguaaAfuggUfgUfuAfaCfcsAfsg |
| AD-56433.2 | A-115891.2 | GfgUfuAfaCfaCfCfAfUfUfUfAfcUfuCfaAfL96 | A-115922.2 | uUfgAfaGfuaaauggUfgUfuAfaCfcsAfsg |
| AD-56438.2 | A-115892.2 | GfgUfuAfaCfAfCfCfAfUfUfuAfcUfuCfaAfL96 | A-115923.2 | uUfgAfaGfuAfaauggugUfuAfaCfcsAfsg |
| AD-56444.2 | A-115893.2 | GfgUfuAfAfCfAfCfCfAfuUfuAfcUfuCfaAfL96 | A-115924.2 | uUfgAfaGfuAfaAfugguguuAfaCfcsAfsg |
| AD-56450.2 | A-115894.2 | GfgUfUfAfAfCfaCfCfAfuUfuAfcUfuCfaAfL96 | A-115925.2 | uUfgAfaGfuAfaAfuggUfguuaaCfcsAfsg |
| AD-56456.2 | A-115895.2 | GfGfUfUfAfaCfaCfCfAfuUfuAfcUfuCfaAfL96 | A-115926.2 | uUfgAfaGfuAfaAfuggUfgUfuaaccsAfsg |
| AD-56462.2 | A-115896.2 | GfgUfuAfaCfaCfCfAfuUfuAfcUfucaaL96 | A-115907.2 | UfUfGfAfaGfuAfaAfuggUfgUfuAfaCfcsAfsg |
| AD-56422.2 | A-115897.2 | GfgUfuAfaCfaCfCfAfuUfuAfcuucaAfL96 | A-115908.2 | uUfGfAfAfGfuAfaAfuggUfgUfuAfaCfcsAfsg |
| AD-56428.2 | A-115898.2 | GfgUfuAfaCfaCfCfAfuUfuacuuCfaAfL96 | A-115909.2 | uUfgAfAfGfUfAfaAfuggUfgUfuAfaCfcsAfsg |
| AD-56434.2 | A-115899.2 | GfgUfuAfaCfaCfCfAfuuuacUfuCfaAfL96 | A-115910.2 | uUfgAfaGfUfAfAfAfuggUfgUfuAfaCfcsAfsg |
| AD-56439.2 | A-115900.2 | GfgUfuAfaCfaCfcauuuAfcUfuCfaAfL96 | A-115911.2 | uUfgAfaGfuAfAfAfUfGfgUfgUfuAfaCfcsAfsg |
| AD-56445.2 | A-115901.2 | GfgUfuAfaCfaccauUfuAfcUfuCfaAfL96 | A-115912.2 | BUfgAfaGfuAfaAfUfGfGfUfgUfuAfaCfcsAfsg |
| AD-56451.2 | A-115902.2 | GfgUfuAfacaccAfuUfuAfcUfucfaAfL96 | A-115913.2 | uUfgAfaGfuAfaAfuGfGfUfGfUfuAfaCfcsAfsg |
| AD-56457.2 | A-115903.2 | GfgUfuAfacaCfCfAfuuuAfcUfuCfaAfL96 | A-115914.2 | uUfgAfaGfuAfAfAfuggUfGfUfuAfaCfcsAfsg |
| AD-56463.2 | A-115904.2 | GfgUfuaacaCtCfAfuUfuAfcUfuCfaAfL96 | A-115915.2 | uUfgAfaGfuAfaAfuggUfGfUfUfAfaCfcsAfsg |
| AD-56423.2 | A-115905.2 | GfguuaaCfaCfCfAfuUfuAfcUfuCfaAfL96 | A-115916.2 | uUfgAfaGfuAfaAfuggUfgUfUfAfAfCfcsAfsg |
| AD-56429.2 | A-115906.2 | gguuAfaCfaCfCfAfuUfuAfcUfuCfaAfL96 | A-115917.2 | uUfgAfaGfuAfaAfuggUfgUfuAfAfCfCfsAfsg |
| AD-56440.2 | A-113073.31 | GfgUfuAfaCfaCfCfAfuUfuAfcUfuCfaAfL96 | A-115928.1 | uUfgAfaGfuAfaAfugGfUfgUfuAfaCfcsAfsg |
| AD-56446.2 | A-115929.1 | GfgUfuAfaCfacCfAfuUfuAfcUfuCfaAfL96 | A-115928.2 | uUfgAfaGfuAfaAfugGfUfgUfuAfaCfcsAfsg |
| AD-56452.2 | A-113073.32 | GfgUfuAfaCfaCfCfAfuUfuAfcUfuCfaAfL96 | A-115930.1 | UUfgAfaGfuAfaAfugGfUfgUfuAfaCfcsAfsg |
| AD-56458.2 | A-115929.2 | GfgUfuAfaCfacCfAfuUfuAfcUfuCfaAfL96 | A-115930.2 | UUfgAfaGfuAfaAfugGfUfgUfuAfaCfcsAfsg |
| AD-56464.2 | A-113073.33 | GfgUfuAfaCfaCfCfAfuUfuAfcUfuCfaAfL96 | A-115931.1 | uUfgAfaGfuAfaAfugGUfgUfuAfaCfcsAfsg |
| AD-56424.2 | A-115929.3 | GfgUfuAfaCfacCfAfuUfuAfcUfuCfaAfL96 | A-115931.2 | uUfgAfaGfuAfaAfugGUfgUfuAfaCfcsAfsg |
| AD-56430.2 | A-115932.1 | GfgUfuAfaCfaCCfAfuUfuAfcUfuCfaAfL96 | A-115931.3 | uUfgAfaGfuAfaAfugGUfgUfuAfaCfcsAfsg |
| AD-56435.2 | A-113073.34 | GfgUfuAfaCfaCFCfAfuUfuAfcUfuCfaAfL96 | A-115933.1 | UUfgAfaGfuAfaAfugGUfgUfuAfaCfcsAfsg |
| AD-56441.2 | A-115929.4 | GfgUfuAfaCfacCfAfuUfuAfcUfuCfaAfL96 | A-115933.2 | UUfgAfaGfuAfaAfugGUfgUfuAfaCfcsAfsg |
| AD-56447.2 | A-115932.2 | GfgUfuAfaCfaCCfAfuUfuAfcUfuCfaAfL96 | A-115933.3 | UUfgAfaGfuAfaAfugGUfgUfuAfaCfcsAfsg |
| AD-56453.2 | A-115934.1 | GfgUfuAfaCfaUfCfAfuUfuAfcUfuCfaAfL96 | A-113074.39 | uUfgAfaGfuAfaAfuggUfgUfuAfaCfcsAfsg |
| AD-56459.2 | A-115935.1 | GfgUfuAfaCfaAfCfAfuUfuAfcUfuCfaAfL96 | A-113074.40 | uUfgAfaGfuAfaAfuggUfgUfuAfaCfcsAfsg |
| AD-56465.2 | A-115936.1 | GfgUfuAfaCfaCfUfAfuUfuAfcUfuCfaAfL96 | A-113074.41 | uUfgAfaGfuAfaAfuggUfgUfuAfaCfcsAfsg |
| AD-56471.2 | A-115937.1 | GfgUfuAfaCfaCfAfAfuUfuAfcUfuCfaAfL96 | A-113074.42 | uUfgAfaGfuAfaAfuggUfgUfuAfaCfcsAfsg |
| AD-56477.2 | A-113073.35 | GfgUfuAfaCfaCfCfAfuUfuAfcUfuCfaAfL96 | A-115938.1 | uUfgAfaGfuAfaAfuggUfgUfuAfaCfc |
| AD-56483.3 | A-113073.36 | GfgUfuAfaCfaCfCfAfuUfuAfcUfuCfaAfL96 | A-115939.1 | uUfgAfaGfuAfaAfuggUfgUfuAfaCfsc |
| AD-56488.2 | A-113073.37 | GfgUfuAfaCfaCfCfAfuUfuAfcUfuCfaAfL96 | A-115940.1 | uUfgAfaGfuAfaAfuggUfgUfuAfasCfsc |
| AD-56483.4 | A-113073.38 | GfgUfuAfaCfaCfCfAfuUfuAfcUfuCfaAfL96 | A-115939.2 | uUfgAfaGfuAfaAfuggUfgUfuAfaCfsc |
| AD-56497.2 | A-115941.1 | UfuAfaCfaCfCfAfuUfuAfcUfuCfaAfL96 | A-115940.2 | uUfgAfaGfuAfaAfuggUfgUfuAfasCfsc |
| AD-56502.2 | A-115941.2 | UfuAfaCfaCfCfAfuUfuAfcUfuCfaAfL96 | A-115942.1 | uUfgAfaGfuAfaAfuggUfgUfuAfa |
| AD-56466.2 | A-115941.3 | UfuAfaCfaCfCfAfuUfuAfcUfuCfaAfL96 | A-115943.1 | uUfgAfaGfuAfaAfuggUfgUfuAfsa |
| AD-56472.2 | A-115941.4 | UfuAfaCfaCfCfAfuUfuAfcUfuCfaAfL96 | A-115944.1 | uUfgAfaGfuAfaAfuggUfgUfusAfsa |
| AD-56478.2 | A-115945.1 | AfaCfaCfCfAfuUfuAfcUfuCfaAfL96 | A-115943.2 | uUfgAfaGfuAfaAfuggUfgUfuAfsa |
| AD-56484.2 | A-115945.2 | AfaCfaCfCfAfuUfuAfcUfuCfaAfL96 | A-115944.2 | uUfgAfaGfuAfaAfuggUfgUfusAfsa |
| AD-56493.2 | A-113073.39 | GfgUfuAfaCfaCfCfAfuUfuAfcUfuCfaAfL96 | A-115948.1 | uUfgAf(Aeo)GfuAfaAfuggUfgUfuAfaCfcsAfsg |
| AD-56498.2 | A-113073.40 | GfgUfuAfaCfaCfCfAfuUfuAfcUfuCfaAfL96 | A-115949.1 | uUfgAfa(Geo)uAfaAfuggUfgUfuAfaCfcsAfsg |
| AD-56467.2 | A-113073.42 | GfgUfuAfaCfaCfCfAfuUfuAfcUfuCfaAfL96 | A-115951.1 | uUfgAfeGfu(Aeo)aAfuggUfgUfuAfaCfcsAfsg |
| AD-56473.2 | A-113073.43 | GfgUfuAfaCfaCfCfAfuUfuAfcUfuCfaAfL96 | A-115952.1 | uUfgAfaGfuAf(Aeo)AfuggUfgUfuAfaCfcsAfsg |
| AD-56479.2 | A-113073.44 | GfgUfuAfaCfaCfCfAfuUfuAfcUfuCfaAfL96 | A-115953.1 | uUfgAfaGfuAfa(Aeo)uggUfgUfuAfaCfcsAfsg |
| AD-56485.2 | A-113073.45 | GfgUfuAfaCfaCfCfAfuUfuAfcUfuCfaAfL96 | A-115954.1 | uUfgAfeGfuAfaAfugg(Teo)gUfuAfaCfcsAfsg |
| AD-56490.2 | A-113073.46 | GfgUfuAfaCfaCfCfAfuUfuAfcUfuCfaAfL96 | A-115955.1 | uUfgAfaGfuAfaAfuggUf(Geo)UfuAfaCfcsAfsg |
| AD-56494.2 | A-113073.47 | GfgUfuAfaCfaCfCfAfuUfuAfcUfuCfaAfL96 | A-115956.1 | uUfgAfaGfuAfaAfuggUfg(Teo)uAfaCfcsAfsg |
| AD-56499.2 | A-113073.48 | GfgUfuAfaCfaCfCfAfuUfuAfcUfuCfaAfL96 | A-115957.1 | uUfgAfaGfuAfaAfuggUfgUf(Teo)AfaCfcsAfsg |
| AD-56504.2 | A-113073.49 | GfgUfuAfaCfaCfCfAfuUfuAfcUfuCfaAfL96 | A-115958.1 | uUfgAfaGfuAfaAfuggUfgUfu(Aeo)aCfcsAfsg |
| AD-56468.2 | A-113073.50 | GfgUfuAfaCfaCfCfAfuUfuAfcUfuCfaAfL96 | A-115959.1 | uUfgAfaGfuAfaAfuggUfgUfuAf(Aeo)CfcsAfsg |
| AD-56474.2 | A-113073.51 | GfgUfuAfaCfaCfCfAfuUfuAfcUfuCfaAfL96 | A-115960.1 | uUfgAfaGfuAfaAfuggUfgUfuAfa(m5Ceo)csAfsg |
| AD-56480.2 | A-113073.52 | GfgUfuAfaCfaCfCfAfuUfuAfcUfuCfaAfL96 | A-115961.1 | uUfgAfaGfuAfaAfuggUfgUfuAfaCf(m5Ceos)Afsg |
| AD-56486.2 | A-113073.53 | GfgUfuAfaCfaCfCfAfuUfuAfcUfuCfaAfL96 | A-115962.1 | uUfgAfaGfuAfaAfuggUfgUfuAfaCfcs(Aeos)(Geo) |
| AD-56491.2 | A-113073.54 | GfgUfuAfaCfaCfCfAfuUfuAfcUfuCfaAfL96 | A-115963.1 | uUfgAfaGfuAfaAf(Teo)(Geo)(Geo)UfgUfusAfsa |
| AD-56495.2 | A-115964.1 | GfgUfuAfaCfaCfCfAfuUfuAfcUf(Teo)Cf(Aeo)AfL96 | A-113074.43 | uUfgAfaGfuAfaAfuggUfgUfuAfaCfcsAfsg |
| AD-56500.2 | A-115965.1 | Gf(Geo)UfuAfaCfaCfCfAfuUfuAfcUf(Teo)Cf(Aeo)AfL96 | A-113074.44 | uUfgAfaGfuAfaAfuggUfgUfuAfaCfcsAfsg |
| AD-56505.2 | A-115966.1 | Gf(Geo)Uf(Teo)AfaCfaCfCfAfuUfuAfcUf(Teo)Cf(Aeo) | A-113074.45 | uUfgAfaGfuAfaAfuggUfgUfuAfaCfcsAfsg |
| | | AfL96 | | |
| AD-56469.2 | A-115967.1 | Gf(Geo)Uf(Teo)AfaCfaCfCfAfuUfuAf(m5Ceo)Uf(Teo) | A-113074.46 | uUfgAfaGfuAfaAfuggUfgUfuAfaCfcsAfsg |
| | | Cf(Aeo)AfL96 | | |
| AD-56475.2 | A-115968.1 | Gf(Gec)Uf(Teo)AfaCfaCfCfAfuUf(Teo)Af(m5Ceo)Uf(Teo) | A-113074.47 | uUfgAfaGfuAfaAfuggUfgUfuAfaCfcsAfsg |
| | | Cf(Aeo)AfL96 | | |
| AD-56481.2 | A-115969.1 | Gf(Geo)Uf(Teo)AfaCfaCfCfAf(Teo)uf(Teo)Af(m5Ceo) | A-113074.48 | uUfgAfaGfuAfaAfuggUfgUfuAfaCfcsAfsg |
| | | Uf(Teo)CfAco)AfL96 | | |
| AD-56487.2 | A-115970.1 | Gf(Geo)Uf(Teo)Af(Aeo)Cf(Aeo)CfCfAf(Teo)Uf(Teo)Af | A-113074.49 | uUfgAfaGfuAfaAfuggUfgUfuAfaCfcsAfsg |
| | | {m5Ceo)Uf(Teo)Cf(Aeo)AfL96 | | |

### Example 3: LNP-Mediated Delivery of siRNAs

[0454] Based on the in vitro single dose and ICso results described above, modified AD-50509 was selected for formulation in a lipid nanoparticle (LNP). In order to determine an effective dose for LNP-mediated delivery of AD-50509, CD1 mice were intravenously injected with a single dose of an LNP formulation (AF-011) of AD-50509 siRNA at 0.003, 0.01, 0.03, 0.1, 0.3, or 1.0 mg/kg. Animals were sacrificed 48 hours later and the level of Serpinc1 mRNA relative to GAPDH and the level of Serpinc1 protein were determined as described herein. As shown in FIGS. 3A and 3B, the maximum Serpinc1 mRNA silencing of 85% with AF-011-AD-50509 was achieved with an EDso of about 0.1 mg/kg (FIG. 3A) and the maximum Serpinc1 protein silencing of 90% was achieved with an EDso of about 0.05 mg/kg (FIG. 3B).

[0455] The duration of silencing of an LNP formulation of AD-50509 siRNA (AF-011-50509) was determined in CD1 mice following a single 1 mg/kg intravenous injection of the siRNA. Animals were sacrificed at Day 1, 2, 3, 7, 14, 21, or 28 after administration and the relative level of Serpinc1 mRNA and the level of Serpinc1 protein were determined. FIG. 4A demonstrates that AF-011 formulated AD-50509 achieved Serpinc1 mRNA silencing of about 90% within 24 hours of administration and that there was approximately a 50% receovery in the relative amount of Serpinc1 mRNA by about two weeks after administration. FIG. 4B demonstrates that AF-011 formulated AD-50509 achieved Serpinc1 protein silencing of about 90% within about 72 hours of administration and that there was approximately a 50% recovery in the relative amount of Serpinc1 protein by about two weeks after administration. Serpinc1 activity was also determined by measuring Factor Xa activity using a commercially available kit (Aniara) in CD1 mice following a single 1 mg/kg intravenous injection of the LNP formulated AD-50509 siRNA. Animals were sacrificed at Day 1, 2, 3, 7, 14, 21, or 28 after administration and the relative activity level of Serpinc1 protein and the relative Serpinc1 protein level were determined. FIG. 4C shows that there is good correlation between the level of Serpinc1 protein level and Serpinc1 activity.

### Example 4: GalNAc-Conjugated siRNAs

[0456] Forty-four modified Serpinc1 siRNA duplexes were conujugated with a trivalent GALNAc at the 3-end of the sense strand. These duplexes were assayed for efficacy in single dose free uptake of the conjugated duplexes in Cynomolgus monkey hepatocytes. Table 9 shows the results of these assays.

TABLE 9
GalNAc Free-Uptake Single Dose

| Duplex ID | Ave 100 nM | Ave 10 nM | Ave 0.1 nM |
|---|---|---|---|
| AD-54944.1 | 0.4 | 0.53 | 0.94 |
| AD-54951.1 | 0.37 | 0.56 | 1 |
| AD-54942.1 | 0.38 | 0.58 | 1.01 |
| AD-54948.1 | 0.36 | 0.6 | 0.96 |
| AD-54957.1 | 0.47 | 0.61 | 1 |
| AD-54933.1 | 0.51 | 0.65 | 0.96 |
| AD-54962.1 | 0.48 | 0.66 | 0.95 |
| AD-54972.1 | 0.49 | 0.66 | 1.05 |
| AD-54949.1 | 0.49 | 0.71 | 0.96 |
| AD-54936.1 | 0.54 | 0.72 | 1.07 |
| AD-54971.1 | 0.49 | 0.72 | 1 |
| AD-54955.1 | 0.52 | 0.74 | 0.98 |
| AD-54953.1 | 0.63 | 0.76 | 1.07 |
| AD-54937.1 | 0.64 | 0.81 | 0.94 |
| AD-54967.1 | 0.74 | 0.82 | 1.02 |
| AD-54935.1 | 0.68 | 0.83 | 0.99 |
| AD-54976.1 | 0.7 | 0.85 | 1.04 |
| AD-54965.1 | 0.7 | 0.86 | 0.97 |
| AD-54959.1 | 0.79 | 0.86 | 0.95 |
| AD-54943.1 | 0.75 | 0.86 | 0.94 |
| AD-54956.1 | 0.86 | 0.87 | 0.95 |
| AD-54973.1 | 0.96 | 0.89 | 1 |
| AD-54975.1 | 0.67 | 0.89 | 0.99 |
| AD-54963.1 | 0.73 | 0.9 | 0.96 |
| AD-54978.1 | 0.85 | 0.9 | 0.98 |
| AD-54952.1 | 0.59 | 0.91 | 1.11 |
| AD-54950.1 | 0.89 | 0.91 | 0.95 |
| AD-54964.1 | 0.87 | 0.93 | 1.01 |
| AD-54974.1 | 0.83 | 0.93 | 0.96 |
| AD-54969.1 | 0.87 | 0.94 | 0.94 |
| AD-54961.1 | 0.74 | 0.94 | 1.07 |
| AD-54968.1 | 0.89 | 0.95 | 0.91 |
| AD-54947.1 | 0.92 | 0.96 | 0.94 |
| AD-54941.1 | 0.91 | 0.96 | 1 |
| AD-54966.1 | 0.93 | 0.97 | 1.06 |
| AD-54940.1 | 0.86 | 0.99 | 1.03 |
| AD-54958.1 | 0.97 | 0.99 | 1.06 |
| AD-54938.1 | 0.93 | 0.99 | 1.05 |
| AD-54934.1 | 0.92 | 1 | 0.96 |
| AD-54939.1 | 0.84 | 1.02 | 1.02 |
| AD-54960.1 | 0.98 | 1.03 | 1.02 |
| AD-54954.1 | 1.04 | 1.03 | 1.01 |
| AD-54970.1 | 1.03 | 1.06 | 1.01 |
| AD-54946.1 | 0.83 | 1.17 | 1.1 |

[0457] These duplexes were also assayed for dose response in free uptake and transfection assays.

[0458] Table 10 shows the results of these assays and the rank order of the duplexes for both free uptake and transfection. The 5 duplexes with the best IC₅₀ are italicized and the bottom 5 duplexes are bolded. The IC₅₀ rank order of the duplexes is well conserved between free uptake and transfection-mediated uptake of GalNAc conjugates.

TABLE 10
Dose Response of GalNAc-conjugated duplexes:
Free uptake and Transfection

| | Free | Free | Transfection | Transfection |
|---|---|---|---|---|
| | Uptake (nM) | Uptake Rank | (nM) | Rank |
| AD-54948.1 | 8.2 | 1 | 0.018 | 3 |
| AD-54951.1 | 10.1 | 2 | 0.009 | 1 |
| AD-54942.1 | 10.8 | 3 | 0.024 | 6 |
| AD-54957.1 | 17.8 | 4 | 0.012 | 2 |
| AD-54944.1 | 19.3 | 5 | 0.019 | 4 |
| AD-54933.1 | 33.2 | 6 | 0.031 | 7 |
| AD-54936.1 | 43.2 | 7 | 0.032 | 9 |
| AD-54971.1 | 44.7 | 8 | 0.041 | 11 |
| AD-54962.1 | 80.2 | 9 | 0.032 | 8 |
| AD-54972.1 | 101.4 | 10 | 0.035 | 10 |
| AD-54955.1 | 148.1 | 11 | 0.022 | 5 |
| AD-54949.1 | No IC50 | 12 | 0.302 | 13 |
| AD-54953.1 | No IC50 | 13 | 0.058 | 12 |

### Example 5: AD-54944 Optimization

[0459] As described in Example 4 above, AD-54944 was among the most active GalNAc-conjugated siRNA duplex as determined by both free uptake and transfection assays and was, thus, selected for further optimization and in vivo testing.

[0460] Twenty-nine compounds were prepared based on the same AD-54944 parent sequence and screened for in vivo efficacy using a single 10 mg/kg dose. Animals (C57BL/6) were injected subcutaneously at Day 0 and sacrificed at Day 3. Serum Serpinc1 protein levels were determined by ELISA assay and the level of Serpinc1 mRNA was determined by QRT-PCR using liver samples from the animals. Tables 11 and 12 show the sequences of the duplexes and the results of the single dose screen with these duplexes as a percent knock-down of Serpinc1 protein levels from PBS. FIG. 5 shows the results of the single dose screen as a percent knock-down of Serpince mRNA and protein levels from PBS.

TABLE 11
AD-54944 optimized sequences and protein levels. (The “Sense Sequence” column
sequences are disclosed as SEQ ID NOs: 779-808, respectively, in order of
appearance, and the “Antisense Sequence” column sequences are disclosed as
SEQ ID NOs: 809-838, respectively, in order of appearance)

| Duplex | | | % | Std |
|---|---|---|---|---|
| Name | Sense Sequence | Antisense Sequence | PBS | Dev |
| AD-54944 | GfgUfuAfaCfaCfCfAfuUfuAfcUfuCfaAfL96 | uUfgAfaGfuAfaAfuggUfgUfuAfaCfcsAfsg | 66.8 | 4.8 |
| (new) | | | | |
| AD-56345 | GfgUfuAfaCfaCfCfAfuUfuAfcUfuCfaAfL96 | uUfgaaGfuAfaAfuggUfguuAfaCfcsasg | 83.6 | 19.2 |
| AD-56351 | GfguuAfaCfaCfCfAfuUfuAfcUfuCfaAfL96 | uUfgaaGfuAfaAfuggUfguuAfaCfcsasg | 71.7 | 7.5 |
| AD-56363 | GfguuAfaCfaCfCfAfuUfuacUfuCfaal96 | uUfgaaGfuAfaAfuggUfguuAfaCfcsasg | 57.9 | 7.6 |
| AD-56334 | GfguuAfacaCfCfAfuuuacUfucaaL96 | uUfgaaGfuAfaAfuggUfguuAfaCfcsasg | 59.4 | 6.0 |
| AD-56346 | GfguuaacaCfCfAfuuuacuucaaL96 | uUfgaaGfuAfaAfuggUfguuAfaCfcsasg | 82.3 | 13.2 |
| AD-56352 | GfgUfUfAfaCfaCfCfAfuUfuAfcUfuCfaAfL96 | uUfgAfaGfuAfaAfuggUfgUfuAfaCfcsAfsg | 52.2 | 3.6 |
| AD-56410 | GfgUfuAfaCfaCfCfAfuUfuAfcUfUfCfAfAfL96 | uUfgAfaGfuAfaAfuggUfgUfuAfaCfcsAfsg | 55.0 | 2.5 |
| AD-56405 | GfGfUfUfAfaCfaCfCfAfuUfuAfcUfuCfaAfL96 | uUfgAfaGfuAfaAfuggUfgUfuAfaCfcsAfsg | 60.6 | 3.1 |
| AD-56383 | GfgUfuAfaCfaCfCfAfuUfuAfcUfuCfaAfL96 | UfUfGfAfaGfuAfaAfuggUfgUfuAfaCfcsAf | 66.7 | 7.6 |
| | | sg | | |
| AD-56730 | GfgUfuAfaCfaCfCfAfuUfuAfcUfUfCfAfAfL96 | uUfgAfaGfuAfaAfuggUfgUfuAfaCfCfsAfs | 64.4 | 3.4 |
| | | Gf | | |
| AD-56380 | GfgUfUfAfaCfaCfCfAfuUfUfAfcUfUfCfAfAfL96 | uUfgAfAfGfUfAfaAfuggUfgUfUfAfaCfcsA | 75.7 | 5.0 |
| | | fsg | | |
| AD-56397 | GfGfUfUfAfAfCfAfCfCfAfuUfUfAfCfUfUfCfAfA | uUfgAfAfGfuAfaAfuggUfgUfUfAfaCfcsAf | 76.9 | 0.8 |
| | fL96 | sg | | |
| AD-56434 | GfgUfuAfaCfaCfCfAfuuuacUfuCfaAfL96 | uUfgAfaGfUtAfAfAfuggUfgUfuAfaCfcsAf | 52.0 | 5.1 |
| | | sg | | |
| AD-56488 | GfgUfuAfaCfaCfCfAfuUfuAfcUfuCfaAfL96 | uUfgAfaGfuAfaAfuggUfgUfuAfasCfsc | 85.3 | 16.6 |
| AD-56486 | GfgUfuAfaCfaCfCfAfuUfuAfcUfuCfaAfL96 | uUfgAfaGfuAfaAfuggUfgUfuAfaCfcs | 67.7 | 0.5 |
| | | (Aeos)(Geo) | | |
| AD-56505 | Gf(Geo)Uf(Teo)AfaCfaCfCfAfuUfuAfcUf(Teo) | uUfgAfaGfuAfaAfuggUfgUfuAfaCfcsAfsg | 59.7 | 0.2 |
| | Cf(Aeo)AfL96 | | | |
| AD-56736 | Gf(Geo)Uf{Teo)AfaCfaCfCfAfuUf(Teo)Af | uUfgAfaGfuAfaAfuggUf(Geo)UfuAfaCfcs | 49.7 | 1.2 |
| | (m5Ceo)Uf(Teo)Cf(Aeo)AfL96 | fAsg | | |
| AD-56738 | Gf(Geo)Uf(Teo)AfaCfaCfCfAfuUfuAfcUf(Teo) | uUfgaaGfuAfaAfuggUfguuAfaCfcsasg | 65.0 | 3.6 |
| | Cf(Aeo)AfL96 | | | |
| AD-56739 | Gf(Geo)Uf(Teo)AfaCfaCfCfAfuUf(Teo)Af | uufgaaGfuAfaAfuggUfguuAfaCfcsasg | 57.6 | 2.1 |
| | (m5Ceo)Uf(Teo)Cf(Aeo)AfL96 | | | |
| AD-56740 | Gf(Geo)Uf(Teo)AfaCfaCfCfAfuUfuAfcUf(Teo) | uUfgaeGfuAfsAfuggUfgUfuAfaCfcsasg | 85.5 | 14.3 |
| | Cf(Aeo)AfL96 | | | |
| AD-56743 | Gf(Geo)UfuAlaCfaCfCfAfUfuAfcUf(Teo)Cf | uUfgaaGfuAfaAfuggUfgUfuAfacfcsasg | 48.3 | 3.9 |
| | (Asc)AfL96 | | | |
| AD-56745 | Gf(Geo)Uf(Teo)AfaCfaCfCfAfuUfuAf(m5Ceo) | uUfgasGfuAfsAfuggUfgUfuAfaCfcsasg | 54.4 | 9.9 |
| | Uf(Teo)Cf(Aeo)AfL96 | | | |
| AD-56454 | GfgUfuAfaCfaCfCfAfulfuAfcufuCfaAfL96 | uugaaGfuAfaAfuggufgUfuAfaCfcsAfsg | 72.2 | 12.0 |
| AD-56449 | GfgUfuAfaCfaCfCfAfuUfuAfcUfuCfaAfL96 | uUfgAfaGfuAfaAfuggUfgUfuaaccsAfsg | 54.4 | 15.9 |
| AD-56746 | Gf(Geo)UfuAfaCfaCfCfAfuUafAfcUf(Teo)Cf | uUfgAfaGfuAfaAfuggUfgUfuaaccsAfsg | 64.7 | 17.2 |
| | (Aeo)AfL96 | | | |
| AD-56333 | GfguuAfacaCfCfAfuuuacuucaaL96 | uUfgaaGfuAfaAfuggUfgUfuAfaCfcsasg | 71.5 | 11.3 |
| AD-56382 | GfGufuAfaCfaCfCfAfuuuacUfuCfaAfL96 | uUfgAfaGfuAfaAfuggUfgUfuAfaCfcsAfsg | 65.7 | 2.7 |
| AD-56748 | GfGufuAfaCfaCfCfAfuuuacUfuCfaAfL96 | uUfgaaGfuAfaAfuggUfguuAfaCfcsasg | 99.4 | 19.2 |
| AD-54944 | GfgUfuAfaCfacfCfAtoufuAfcufuCfaAfL96 | uUfgAfaGfuAfaAluggUfgUfuAfaCfcsAfsg | 46.9 | 1.7 |
| (original) | | | | |
| control | | | 96.0 | 8.5 |
| PBS | | | 100.0 | 4.7 |

TABLE 12
AD-54944 optimized sequences and protein levels. (The “Sense Sequence” column sequences
are disclosed as SEQ ID NOS: 839-868, respectively, in order of appearance, and the
“Antisense Sequence” column sequences are disclosed as SEQ ID NOs: 869-898,
respectively, in order of appearance)

| Duplex | | | % | Std |
|---|---|---|---|---|
| Name | Sense Sequence | Antisense Sequence | PBS | Dev |
| AD-54944 | GfgUfuAfaCfaCfCfAfuUfuAfcUfuCfaAfL96 | uUfgAfaGfuAfaAfuggUfgUfuAfaCfcsAfsg | 46.9 | 1.7 |
| (original) | | | | |
| AD-56743 | Gf(Geo)UfuAfaCfaCfCfAfuufuAfcuf(Teo)Cf(Aeo) | uUfgaaGfuAfaAfuggUfgUfuAfaCfcsasg | 48.3 | 3.9 |
| | AfL96 | | | |
| AD-56736 | Gf(Geo)Uf(Teo)AfaCfaCfCfAfuUf(Teo)Af(m5Ceo) | uUfgAfaGfuAfaAfuggUf(Geo)UfuAfaCfcs | 49.7 | 1.2 |
| | Uf(Teo)Cf(Aeo)AfL96 | Afsg | | |
| AD-56434 | GfgUfuAfaCfaCfCfAfuuuacUfuCfaAfL96 | uUfgAfaGfUfAfAfAfuggUfgUfuAfaCfcsAfsg | 52.0 | 5.1 |
| AD-56352 | GfgutufAfaCfactCAfuUfuAfcUfucfaAfL96 | uUfaAfaGfuAfaAfuggUfgUfuAfaCfcsAfsg | 52.2 | 3.6 |
| AD-56745 | Gf(Geo)Uf(Teo)AfaCfaCfCfAfuUfuAf(m5Ceo)Uf | uUfgaaGfuAfaAfuggUfgUfuAfaCfcsasg | 54.4 | 9.9 |
| | (Teo)Cf(Aeo)AfL96 | | | |
| AD-56449 | GfgUfuAfactaCfCfAfuUfuAfcUfuCfaAfL96 | uUfgAfaGfuAfaAfuggUfgUfuaaccsAfsg | 54.4 | 15.9 |
| AD-56410 | GfgUfuAfaCfaCfCfAfuUfuAfuUfuAfcUfUfCfAfAfL96 | uUfgAfaGfuAfaAfuggUfgUfuAfaCfcsAfsg | 55.0 | 2.5 |
| AD-56739 | Gf(Geo)Uf(Teo)AfACfaCfCfAfuUf(Teo)Af(m5Ceo) | uUfgaaGfuAfaAfuggUfguuAfaCfcsasg | 57.5 | 2.1 |
| | Uf(Teo)Cf(Aeo)AfL96 | | | |
| AD-56363 | GfguuAfaCfaCfCfAfuUfuUfuacUfuCfaaL96 | uUfgaaGfuAfaAfuggUfguuAfaCfcsasg | 57.9 | 7.6 |
| AD-56334 | GfguuAfacaCfCfAfuuuacUfucaaL96 | uUfgaaGfuAfaAtuggUfguuAfaCfcsasg | 59.4 | 6.0 |
| AD-56505 | Gf(geo)Uf(teo)AfaCfaCfCfAfuUfuAfcUf(Teo)Cf | uUfgAfaGfuAfaAfuggUfgUfuAfaCfcsAfsg | 59.7 | 0.2 |
| | (Aeo)AfL96 | | | |
| AD-56405 | GfGfUfUfAfaCfaCfCfAfuUfuAfcUfuCfaAfL96 | uUfgAfaGfuAfaAfuggUfgUfuAfaCfcsAfsg | 60.6 | 3.1 |
| AD-56730 | GfgUfuAfaCfaCfCfAfuUfuAfcUfUfCfAfAfL96 | uUfgAfaGfuAfaAfuggUfgUfAfaCfCfsAfsGf | 64.4 | 3.4 |
| AD-56746 | Gf(Geo)UfuAfaCfaCfCfAfuUfuAfcUf(Teo)Cf(Aeo) | uUfgAfaGfuAfaAfuggUfgUfuaaccsÅfsg | 64.7 | 17.2 |
| | AfL96 | | | |
| AD-56738 | Gf(Geo)Uf(Teo)AfaCfaCfCfAfuUfuAfcUf(Teo)Cf | uUfgaaGfuAfaAfuggUfguuAfaCfcsasg | 65.0 | 3.6 |
| | (Aeo)AfL96 | | | |
| AD-56382 | GfgUfuAfaCfacfCfAfuuuacUfuCfaAfL96 | uUfgAfaGfuAfaAfuggUfgUfuAfaCfcsAfsg | 65.7 | 2.7 |
| AD-56383 | GfgUfuAfaCfaCfCfAfuUfuAfcUfuCfaAfL96 | uUfufGfAfaGfyAfaAfuggUfgUfuAfaCfcs | 66.7 | 7.6 |
| | | Afsg | | |
| AD-54944 | GfgUfuAfaCfaCfCfAfcUfuAfcUfuCfaAfL96 | uUfgAfaGfuAfaAfuggUfgUfuAfaCfcsAfsg | 66.8 | 4.8 |
| (new) | | | | |
| AD-56485 | GfgUfuAfaCfacfCfAfcUfuAfcUfuCfaAfL96 | uUfgAfaGfuAfaAfuggUfgUfcAfacfcs(Aeos) | 67.7 | 0.5 |
| | | (Geo) | | |
| AD-56333 | GfguuAfacaCfCfAfuuuacuucaaL96 | uUfgsaGfeAfaAfuggUfgUfuAfaCfcsasg | 73.5 | 21.3 |
| AD-56351 | GfguuAfaCfaCfCfAfuUfuAfcUfUCfaAfL96 | uUfgsaGfuAfeAfuggUfguuAfaCfcsasg | 71.7 | 7.5 |
| AD-56454 | GfgUfuAfaCfacfCfAfuUfuAfcUfuCfaAfL96 | uugaaGfuAfaAfuggUfgUfuAfaCfcsAfsg | 72.0 | 11.0 |
| AD-56380 | GfgUfUfAfaCaCfCfAfuUfUfAfcUfUfCfAfAfL96 | uUfgAfAfGfUfAfAfaAfuggUfgUfUfAfaCfcs | 75.7 | 5.0 |
| | | Afsg | | |
| AD-56397 | GfGfUfgUfgAfAfCfAfCfCfAfuUfUfAfCfUfUfCfAf | uUfgAfAfGfuAfaAfuggUfgUfUfAfaCfcsÅfsg | 76.9 | 0.8 |
| | AfL96 | | | |
| AD-55346 | GfguuaacaCfCfAfuuuacuucaaL96 | uUfgaaGfuAfAfuggUfguuAfaCfcsasg | 82.3 | 33.2 |
| AD-56345 | GfgUfuAfaCfaCfCfAfuUfuAfcUfuCfaAfL96 | uUfgaaGfuAfaAfuggUfguuAfaCfcsasg | 83.5 | 19.2 |
| AD-56488 | GfgUfuAfaCfaCfCfAfuUfuAfcUfuCfaAfL96 | uUfgAfaGfuAfaAfuggUfgUfuAfasCfsc | 85.3 | 36.6 |
| AD-56740 | Gf(Geo)Uf(Teo)AfaCfaCfCfAfuUfuAfcUf(Teo)Cf | uUfgaaGfuAfaAfuggUfgUfuAfaCfcsasg | 85.5 | 14.8 |
| | (Aeo)AfL96 | | | |
| | | | 96.0 | 8.5 |
| AD-56748 | GfgUfuAfaCfaCfCfAfuuuacUfuCfaAfL96 | uUfgaaGfuAfaAfuggUfguuAfaCfcsasg | 99.4 | 29.2 |
| PBS | | | 200.0 | 4.7 |

[0461] The in vivo dose response of AD-54944 conjugated to GalNAc was determined by administering a single subcutaneous dose to C57BL/6J mice (n=5). AD-54944 conjugated to GalNAc was also administered subcutaneously as a repeat daily dose of 5 mg/kg to C57BL/6J mice (n=5) over a 5-day period. Animals were sacrificed 72 hours after administration and Serpinc1 protein and activity levels were determined in liver and serum samples as described above.

[0462] As shown in FIG. 6, a single subcutaneous dose of AD-54944 conjugated to GalNAc resulted in a protein EC₅₀ of about 10 mg/kg and a 5×5 mg/kg daily, repeat dose resulted in about a 75% protein silencing.

[0463] Additional repeat-dosing of AD-54944 conjugated to GalNAc in C57BL/6J mice was also performed over an 8-week period to determine the efficacy and duration of silencing. FIGS. 7A and 7B show the results of these studies.

### Example 6: Dose Duration of a Split-Dose of AD-54944

[0464] In order to further evaluate compound AD-54944 knock-down of Serpinc1 expression and activity, a split-dosing experiment was performed. C57BL/6 mice were subcutaneously administered GalNAc-conjugated AD-54944 and the effect of a 3 times per week, ⅓ dose of AD-54944 was compared to the effect of a 1 time per week fully concentrated dose of AD-54944. A summary of the study design is presented in Table 13. Serum Serpinc1 protein levels were determined at Days 0, 3, 7, 10, 14, 17, 21, 24, 29, 31, and 35.

TABLE 13
Study Design of Split-Dosing Experiment

| Group | Test compound | Dose (mg/kg) | Frequency |
|---|---|---|---|
| 1 | AD-54944 | 1.25 | 3x/week |
| 2 | | 2.5 | (M, W, F) |
| 3 | | 5 | |
| 4 | | 10 | |
| 5 | | 3.75 | 1x/week |
| 6 | | 7.5 | (Monday) |
| 7 | | 15 | |
| 8 | | 30 | |
| 9 | PBS | — | |

[0465] The results of the one-time per week split-dose screen as a percent knock-down of Serpinc1 protein levels from pre-dose levels are shown in FIG. 8 and the results of the three-time per week screen as a percent knock-down of Serpinc1 protein levels from pre-dose levels are shown in FIG. 9. The results demonstrate that there is a dose response effect with AD-54944 conjugated to GalNAc in both groups and that doages at both 30 mg/kg one time per week and at 10 mg/kg three times per week lead to long-term silencing of Serpinc1.

### Example 7: Further Optimization of AD-54944

[0466] In order to further improve the efficacy of AD-54944, additional compounds were prepared based on the AD-54944 parent sequence. In general, the modifications included the addition of phosphorothioate linkages, C16(hexadecyl) modifications, 5′-end-caps, and 2′-methyls. The new compounds were screened for in vivo efficacy using both a single 3 mg/kg dose and a single 10 mg/kg dose. Animals (C57BL/6) were injected subcutaneously at Day 0 and sacrificed at Day 3. Serum Serpinc1 protein levels were determined by ELISA assay. The ELISA assay was performed using an Antithrombin III Mouse ELISA kit purchased from Abcam. Briefly, serum was diluted (e.g., about 1:10,000) and used accordingly to manufacturers instructions. The plates were read at 450 nm at the end of the assay.

[0467] Table 14 shows the sequences of the duplexes and the results of the single dose screens with these duplexes as a percent knock-down of Serpinc1 protein levels from PBS. FIGS. 10A and 10B show the results of the single dose screen as a percent knock-down of Serpinc1 protein levels from PBS. As can be seen in Table 14 and FIG. 10, compound AD-56813 emerged as a new lead based on the level of knock-down of Serpinc1 protein levels.

[0468] Further compounds were prepared based on the AD-56813 parent sequence in which the number of 2′-methoxyethyl and phosphorothioate linkages were reduced in order to determine the minimum chemical modifications required for stability of the compounds which maintained activity of the compounds. The new compounds were screened for in vivo efficacy using both a single 3 mg/kg dose and a single 10 mg/kg dose. Animals (C57BL/6) were injected subcutaneously at Day 0 and sacrificed at Day 3. Serpinc1 (AT3) activity and serum Serpinc1 protein levels were determined by ELISA assay. The ELISA assay was performed as described above. Serpinc1 activity was determined using a BIOPHEN (anti-Factor Xa) activity assay kit. Briefly, serum samples were diluted from about 1:20 to about 1:60 and processed according to the manufacturers' instructions. The plates were read at 450 nm at the end of the assay.

[0469] The sequences of the duplexes that were newly prepared and the results of the single dose screens with these duplexes as a percent knock-down of Serpinc1 protein levels from PBS are shown in Table 15. FIG. 11 shows the results of the single dose screen as a percent knock-down of Serpinc1 protein levels from PBS and FIG. 12 shows the results of the single dose screen as a percent knock-down of Serpinc1 activity from PBS.

[0470] As can be seen in Table 15 and FIGS. 11 and 12, although the number of modifications to the compound was dramatically reduced, compound AD-57213 maintained knockdown of Serpinc1 expression and activity and, thus, emerged as a new lead. A single 10 mg/kg dose of AD-57213 led to an ED₉₀ and a single 3 mg/kg dose led to an ED₅₀.

TABLE 14
AD-54944 optimized sequences and protein levels. (The “Sense Sequence” column sequences
are disclosed as SEQ ID NOs: 899-919, respectively, in order of appearance, and the
“Antisense Sequence” column sequences are disclosed as SEQ ID NOs: 920-940, respectively,
in order of appearance)

| | | | | | 3 | | 10 | |
|---|---|---|---|---|---|---|---|---|
| | | | | | mpk | | mpk | |
| | Sense | | | | % | | % | |
| Duplex ID | strand | Sense sequence | Antisense | Antisense sequence | PBS | stdev | PBS | stdev |
| AD-56813.2 | A-116280.6 | Gfs(Geo)UfsuAfaCfsaCfs | A-116278.6 | usUfsgAfaGfAfaAfuggUfsg | 0.62 | 0.04 | 0.26 | 0.04 |
| | | CfsAfuUfsuAfcUfsuCfs | | UfsuAfaCfscs(Aeos)(Geo) | | | | |
| | | (Aeo)AfL96 | | | | | | |
| AD-56789.2 | A-116276.12 | GfgUfsuAfaCfsaCfsCfsAf | A-116275.7 | uUfsgAfaGfuAfaAfuggUfsg | 0.74 | 0.11 | 0.44 | 0.11 |
| | | uUfsuAfcUfsuCfsaAfL96 | | UfsuAfaCfscsAfsg | | | | |
| AD-56741 | A-115968.11 | Gf(Geo)Uf(Teo)AfaCfaCf | A-115861.11 | uUfgaaGfuAfaAfuggUfgUfu | | | 0.52 | 0.09 |
| | | CfAfuUf(Teo)Af(m5Ceo)U | | AfaCfcsasg | | | | |
| | | f(Teo)Cf(Aeo)AfL96 | | | | | | |
| AD-54944/ | A-113073.1 | GfgUfuAfaCfaCfCfAfuUfu | A-113074.1 | uUfgAfaGfuAfaAfuggUfgUf | 0.93 | 0.10 | 0.63 | 0.10 |
| parent | | AfcUfuCfaAfL96 | | uAfaCfcsAfsg | | | | |
| AD-56743 | A-115965.5 | Gf(Geo)UfuAfaCfaCfCfAf | A-115861.11 | uUfgaaGfuAfaAfuggUfgUfu | | | 0.71 | 0.24 |
| | | ulfuAfcUf(Teo)Cf(Aeo)A | | AfaCfcsasg | | | | |
| | | fL96 | | | | | | |
| AD-56836.2 | A-115966.25 | Gf(Geo)Uf(Teo)AfaCfaCf | A-116284.3 | uUfgAfaGf(Uhd)AfaAfuggU | 1.01 | 0.11 | 0.73 | 0.11 |
| | | CfAfuUfuAfcUf(Teo)Cf | | fgUfuAfaCfcsasg | | | | |
| | | (Aeo)AfL96 | | | | | | |
| AD-56797.2 | A-115968.8 | Gf(Geo)Uf(Teo)AfaCfaCf | A-116250.6 | uUfgAfaGfuAfaAfuggUf | 0.87 | 0.25 | 0.74 | 0.25 |
| | | CfAfuUf(Teo)Af(m5Ceo)U | | (Geo)UfuAfaCfcs(Aeos) | | | | |
| | | f(Teo)Cf(Aeo)AfL96 | | (Geo) | | | | |
| AD-56801.2 | A-116277.6 | Gf(Geo)UfsuAfaCfsaCfsC | A-116279.9 | uUfsgAfaGhuAfsAfuggUfsg | 0.83 | 0.08 | 0.77 | 0.08 |
| | | fsAfUfsuAfcUfsuCfs | | UfsuAfaCfscs(Acos)(Geo) | | | | |
| | | (Aeo)AfL96 | | | | | | |
| AD-56831.2 | A-116290.3 | Gf(Geo)Uf(Teo)AfaCfaCf | A-115962.21 | uUfgAfaGfuAfaAfuggUfgUf | 1.11 | 0.09 | 0.78 | 0.09 |
| | | CfCfAfuUf(Uhd)AfcUf | | uAfaCfcs(Aeos)(Geo) | | | | |
| | | (Teo)Cf(Aeo)AfL96 | | | | | | |
| AD-56830.2 | A-116283.3 | Gfs(Geo)UfsuAfaCfsaCfC | A-116279.12 | uUfsgAfaGfuAfaAfuggUfsg | 1.01 | 0.13 | 0.79 | 0.13 |
| | | fAfuUfsuAfcUfuCfs(Aeo) | | UfsuAfaCfscs(Aeos)(Geo) | | | | |
| | | AfL96 | | | | | | |
| AD-56761.2 | A-116247.13 | gguuaacaCfCfAfuuuacu | A-116244.6 | uUfgaaGfuAfaAfuggUfguua | 0.82 | 0.26 | 0.83 | 0.26 |
| | | (Uhd)caaL96 | | accsasg | | | | |
| AD-56735.2 | A-115966.29 | Gf(Geo)Uf(Teo)AfaCfaCf | A-115962.18 | uUfgAfaGfuAfaAfuggUfgUf | 1.20 | 0.15 | 0.90 | 0.15 |
| | | CfAfuUfuAfcUf(Teo)Cf | | uAfaCfcs(Aeos)(Geo) | | | | |
| | | (Aeo)AfL96 | | | | | | |
| AD-56872 | A-115965.5 | Gf(Geo)UfuAfaCfaCfCfAf | A-116392.1 | ufgaaGfAfaAfuggUfguuAfa | | | 0.93 | 0.24 |
| | | uUfuAfcUf(Teo)Cf(Aeo)A | | Cfcs(Aeos)(Geo) | | | | |
| | | fL96 | | | | | | |
| AD-56820.2 | A-116317.4 | gUf(Uhd)AfaCfaCfCfAfuU | A-116297.10 | uUfgAfaGfuAfaAfuggUfgUf | 1.05 | 0.10 | 0.94 | 0.10 |
| | | fuAfcUfuCfaAfL96 | | uAfaCfs(m5Ceos)(Aeo) | | | | |
| AD-56793.2 | A-116382.1 | gdGuudAdAcadCdCauudTdA | A-116373.11 | udTdGadAgdTadAdAuggdTdG | 0.98 | 0.08 | 0.99 | 0.08 |
| | | cU(Uhd)dCadAL96 | | uudAdAcdCsasg | | | | |
| PBS/ | | | | | 1.00 | 0.04 | 1.00 | 0.04 |
| Control | | | | | | | | |
| AD-56873 | A-115968.11 | Gf(Geo)Uf(Teo)AfaCfaCf | A-116392.1 | uUfgasGfuAfaAfuggUfguuA | | | 1.01 | 0.18 |
| | | CfAfuUf(Teo)Af(m5Ceo)U | | faCfcs(Aeos)(Geo) | | | | |
| | | f(Teo)Cf(Aeo)AfL96 | | | | | | |
| AD-54965 | A-113033.1 | AfaCfuGfcCfgAfCfUfcUfa | A-113034.1 | uUfuUfcGfaUfaGfaguCfgGf | 0.89 | 0.07 | 1.03 | 0.07 |
| | | UfcGfaAfsAfL96 | | cAfgUfusCfsa | | | | |
| AD-56787.2 | A-116381.1 | gguuaacaccdAudTudAcdT | A-116373.10 | udTdGadAgdTadAdAdAuggdT | 1.03 | 0.18 | 1.04 | D.18 |
| | | (Uhd)dCasaL96 | | dGuudAdAcdCsasg | | | | |
| AD-56840.2 | A-116317.5 | gUf(Uhd)AfaCfaCfCfAfuU | A-116344.5 | uUfgAfaGfuAfaAfuggUfgUf | 1.38 | 0.14 | 1.05 | D.14 |
| | | fuAfcUfuCfaAfL96 | | AfaCfs(Chds)(Aeo) | | | | |
| AD-56834.2 | A-116333.3 | GbguuAfaCfaCfCfAfUfuAf | A-116334.3 | uUfgaaGfuAfaAfuggUfguuA | 1.17 | 0.14 | 1.06 | 0.14 |
| | | cUfuCfaAfL96 | | faCfcsasGb | | | | |
| AD-56841.2 | A-115966.26 | Gf(Geo)Uf(Teo)AfaCfaCf | A-116285.3 | uUfgAfaGf(Uhd)AfaAfuggU | 1.15 | 0.21 | 1.09 | 0.21 |
| | | CfAfufuAfcUf(Teo)Cf | | fgUfuAfaCfcs(Aeos)(Geo) | | | | |
| | | (Aeo)AfL96 | | | | | | |

TABLE 15
AD-56813 optimized sequences and protein and activity levels. (The “Sense Sequence”
column sequences are disclosed as SEQ ID NOs: 941-959, respectively, in order of
appearance, and the “Antisense Sequence” column sequences are disclosed as SEQ ID
NOs: 960-978, respectively, in order of appearance)

| | | | | | ELISA | | | | Activity | | | |
|---|---|---|---|---|---|---|---|---|---|---|---|---|
| Duplex | | | | | 10 mpk | | 3 mpk | | 10 mpk | | 3 mpk | |
| name | Sense ID | Sense (5′ to 3′) | AS ID | Antisense (5′ to 3′) | Av | SD | Av | SD | Av | SD | Av | SD |
| AD-57213.1 | A-116858.1 | GfsgsUfuAfaCfaCfCfAfuUfuAfcUfuC | A-116861.1 | usUfsgAfaGfuAfaAfuggUfgUfuAfa | 0.098 | 0.021 | 0.264 | 0.032 | 0.099 | 0.021 | 0.255 | 0.030 |
| | | faAfL96 | | Cfcsasg | | | | | | | | |
| AD-S7214.1 | A-116859.1 | GfsgsUfuAfaCfaCfCfAfUf(Uhd)AfcUfu | A-116861.1 | usUfsgAgaGfuAfaAfuggUfgUfuAfa | 0.140 | 0.027 | 0.200 | 0.132 | 0.121 | 0.028 | 0.123 | 0.114 |
| | | CfaAfL96 | | Cfcsasg | | | | | | | | |
| AD-57205.1 | A-113073.1 | GfgUfuAfaCfaCfCfAfuUfuAfcUfuCfa | A-116861.1 | usUfsgAfaGfuAfaAfuggUfgUfuAfa | 0.147 | 0.100 | 0.592 | 0.094 | 0.145 | 0.043 | 0.542 | 0.139 |
| | | AfL96 | | Cfcsasg | | | | | | | | |
| AD-56813.2 | A-116280.6 | Gfs(geo)UfsuAfaCfsaCfsCfsAfuUfsuA | A-116278.6 | usUfsgAfaGfuAfaAfuggUfsgUfsuA | 0.161 | 0.047 | 0.500 | 0.033 | 0.179 | 0.055 | 0.583 | 0.065 |
| | | fcUfsuCfs(Aeo)AfL96 | | faCfscs(Aeos)(Geo) | | | | | | | | |
| AD-57212.1 | A-116276.12 | GfgUfsuAfaCfsaCfsCfsAfuUfsuAfcUfs | A-116860.1 | usUfsgAfaGfuAfaAfuggUfsUfsuAf | 0.164 | 0.026 | 0.355 | 0.007 | 0.198 | 0.011 | 0.395 | 0.023 |
| | | uCfsaAfL96 | | aCfscsasg | | | | | | | | |
| AD-57204.1 | A-113073.1 | GfgUfuAfaCfaCfCfAfuUfuAfcUfuCfaAf | A-116860.1 | usUfscAfcGfuAfaAfuggUfsgUfsuA | 0.170 | 0.127 | 0.659 | 0.004 | 0.121 | 0.094 | 0.008 | 0.060 |
| | | L96 | | faCfsc | | | | | | | | |
| AD-56741.2 | A-115968 | Gf(Geo)Uf(Teo)AfaCfaCfCfAfuUf | A-115861 | suUfgaaGfuAfaAfuggUfgUfuAfaCf | 0.347 | 0.098 | 0.666 | 0.036 | 0.419 | 0.126 | 0.880 | 0.070 |
| | | (Teo)Af(m5Ceo)Uf(Teo)Cf(Aeo)AfL96 | | csasg | | | | | | | | |
| AD-57203.1 | A-113073.1 | GfgUfuAfaCfaCfCfAfuUfuAfcUfuCfa | A-116278.6 | usUfsgAfaGfuAfaAfuggUfsgUfsuA | 0.359 | 0.053 | 0.829 | 0.056 | 0.358 | 0.064 | 0.796 | 0.030 |
| | | AfL96 | | fuCfscs(Aeos)(Geo) | | | | | | | | |
| AD-56765.2 | A-113073.1 | GfgUfuAfaCfaCfCfAfuUfuAfcUfuCfa | A-116275.7 | uUfsgAfaGfAfaAfuggUfsgUfcsAfa | 0.366 | 0.053 | 0.668 | 0.040 | 0.385 | 0.041 | 0.791 | 0.047 |
| | | AfL96 | | CfscsAfsg | | | | | | | | |
| AD-56789.2 | A-116276.12 | GfgUfsuAfaCfsaCfsCfsAfuUfsuAfcUfs | A-116275.7 | uUfsgAfaGfuAfsAfuggUfsgUfsuAf | 0.401 | 0.057 | 0.700 | 0.059 | 0.406 | 0.078 | 0.785 | 0.059 |
| | | uCfsaAfL96 | | aCfscsAfsg | | | | | | | | |
| AD-57211.1 | A-116858.1 | GsgsUfuAfaCfaCfCfCfAfuUfuUfuAfcU | A-113074.1 | uUfgAfagfuAfaAfuggUfgUfuAfaCf | 0.446 | 0.023 | 0.760 | 0.142 | 0.536 | 0.027 | 0.831 | 0.117 |
| | | fuCfaAfL96 | | csAfsg | | | | | | | | |
| AD-57210.1 | A-116857.1 | GfsgsUfuAfaCfaCfsCfsAfuUfuAfcUfuC | A-113074.1 | uUfgAfaGfuAfaAfuggUfgUfuAfaCf | 0.476 | 0.028 | 0.734 | 0.053 | 0.547 | 0.041 | 0.826 | 0.065 |
| | | faAfL96 | | csAfsg | | | | | | | | |
| AD-57208.1 | A-116276.12 | GfgUfsuAfaCfsaCfsCfsAfuUfsuAfcUf | A-113074.1 | uUfgAfaGfuAfaAfuggUfgUfuAfaCf | 0.542 | 0.016 | 0.915 | 0.085 | 0.486 | 0.006 | 0.831 | 0.034 |
| | | suCfsaAfL96 | | csAfsg | | | | | | | | |
| AD-56475.3 | A-115968 | Gf(Geo)Uf(Teo)AfaCfaCfCfAfuUf | A-113074.1 | uUfgAfaGfuAfaAfuggUfgUfuAfaCf | 0.574 | D.058 | 0.932 | 0.127 | 0.415 | 0.019 | 0.735 | 0.123 |
| | | (Teo)Af(m5Ceo)Uf(Teo)Cf | | csAfsg | | | | | | | | |
| | | (Aeo)AfL96 | | | | | | | | | | |
| AD-57209.1 | A-116280.6 | Gfs(Geo)UfsuAfaCfsaCfsCfsAfuUfsu | A-113074.1 | uUfgAfaGfuAfaAfuggUfgUfuAfaCf | 0.588 | 0.135 | 0.966 | 0.100 | 0.460 | 0.136 | 0.323 | 0.026 |
| | | AfcUfsuCfs(Aeo)AfL96 | | csAfsg | | | | | | | | |
| AD-54944.13 | A-113073.1 | GfgUfuAfaCfaCfCfAfuUfuAfcUfuCfa | A-113074.1 | uUfgAfaGfuAfaAfuggUfgUfuAfaCf | 0.617 | 0.025 | 0.715 | 0.071 | 0.667 | 0.016 | 0.835 | 0.083 |
| | | AfL96 | | csAfsg | | | | | | | | |
| AD-57206.1 | A-113073.1 | GfgUfAfaCfaCfCfAfuUfuAfcUfuCfa | A-116870.1 | uUfgAfaGfuAfaAfuggUfgUfuAfaCf | 0.681 | 0.097 | 0.811 | 0.110 | 0.707 | 0.068 | 0.940 | 0.149 |
| | | AfL96 | | cAfsg | | | | | | | | |
| AD-57208.2 | A-116276.12 | GfgUfsuAfaCfsaCfsCfsAfuUfsuAfcUf | A-113074.1 | uUfgAfaGfuAfaAfuggUfgUfuAfaCf | 0.736 | 0.109 | 0.714 | 0.101 | 0.729 | 0.122 | 0.817 | 0.090 |
| | | suCfsaAfL96 | | csAfsg | | | | | | | | |
| AD-57207.1 | A-113073.1 | GfgUfuAfaCfaCfCfAfuUfuAfcUfuC | A-116871.1 | uUfgAfaGfuAfaAfuggUfgUfuAfaCf | 0.934 | 0.043 | 0.975 | 0.035 | 0.984 | 0.104 | 1.000 | 0.066 |
| | | faAfL96 | | cAfg | | | | | | | | |
| | | | | | 1.000 | 0.029 | 1.000 | | 1.000 | 0.077 | 1.000 | |

### Example 8: Serpinc1 Knock-Down in Hemophilic Mice

[0471] Male and female mice having a targeted deletion of Factor VIII (C57BL/6/129 hybrids) and recapitulating the hemophilia A phenotype and control or wild-type (C57BL/6 female) mice were subcutaneously injected with a single dose of compound AD-57213 conjugated to GalNAc at 30 mg/kg, 10 mg/kg, 3 mg/kg, or 1 mg/kg at Day 0, animals were sacrificed at Day 3 and Serpinc1 activity was determined as described above. FIG. 13 shows that, not only does a single dose of AD-57213 effectively knock-down Serpinc1 activity, but there is also a dose response to AD-57213.

[0472] To investigate the impact of antithrombin reduction on thrombin generation in a hemophilia setting, thrombin generation studies were performed on Factor IX (FIX) and Antithrombin- (AT-) depleted human plasma. FIX depletion recapitulates the hemophilia B phenotype AT was subsequently added back to the plasma samples at various levels (1 IU/ml=100%) to generate FIX-depleted plasma samples with different levels of antithrombin (0-100%). Control plasma was generated by adding back 1 IU/ml antithrombin and 5 μg/ml FIX (100%) to the double-depleted plasma. FIG. 31A depicts thrombin generation in FIX- and AT-depleted human plasma (tissue factor=5 pM). FIG. 31B depicts the peak thrombin in FIX- and AT-depleted human plasma (tissue factor=5 pM). Therefore, antithrombin reduction increases thrombin generation in Factor IX-depleted human plasma in vitro.

### Example 9: Dose Duration of AD-57213

[0473] In order to evaluate the duration of anti-thrombin silencing in Hemophilia A mice (B6;129S4-F8^{tm1/Kaz/J}; Jackson Labs) following a single dose of AD-57213 conjugated to GalNAc, mice were subcutaneously injected with compounds AD-57214, AD-57205, or AD-57213orPBS. Whole blood was collected retroorbitally and assayed for Serpinc1 mRNA levels and Serpinc1 activity. The results of the single dose screen for compound AD-57213 administered at 10 mg/kg, 3 mg/kg, or 1 mg/kg as a percent knock-down of Serpinc1 activity from PBS at Days 3, 7, 10, 14, 17, 21, 28, and 36 are depicted in FIG. 14. FIG. 16 shows the results of the single dose screen for compounds AD-57213, AD-57205, and AD-57214 administered at the doses indicated in the Figures as a percent knock-down of Serpinc1 activity from PBS at Days 3, 7, 10, 14, 17, 21, and 25.

[0474] Liver mRNA, AT antigen in serum and AT activity were measured in hemophilia A mice (B6;129S4-F8^{tm1/Kaz/J}; Jackson labs) injected subcutaneously with AD-57213 at a dose of 30 mg/kg, 10 mg/kg, 3 mg/kg, 1 mg/kg, or PBS at Day 0. Animals were sacrificed on Day 3 post-injection as described above. FIG. 15 shows the results of the single dose screen as a percent knock-down of Serpinc1 mRNA levels from PBS, as a percent knock-down of Serpinc1 antigen levels from PBS, and as a percent knock-down of Serpinc1 activity from PBS at Day 3 for AD-57213.

[0475] As evidenced by FIGS. 14-16, administration of compound AD-57213 leads to potent, dose-dependent suppression of Serpinc1 in HA mice with a single dose ED₅₀ of less than 1 mg/kg on Day 7. Serpinc1 suppression was durable and correlated with the maximal level of antithrombin suppression achieved. A single dose of 1 mg/kg led to the maintenance of 50% suppression for about 15 days, while a dose of 10 mg/kg led to greater than 80% suppression maintained for 28 days.

### Example 10: Dose Duration of a Split-Dose of AD-57213

[0476] In order to further evaluate compound AD-57213 knock-down of Serpinc1 expression and activity, a split-dosing experiment was performed. C57BL/6 mice were subcutaneously administered GalNAc-conjugated AD-57213 and the effect of a 3 times per week, ⅓ dose of AD-57213 was compared to the effect of a 1 time per week fully concentrated dose of AD-57213. A summary of the study design is presented in Table 16. Serum Serpinc1 protein levels were determined.

TABLE 16
Study Design of Split-Dosing Experiment

| Group | Test compound | Dose (mg/kg) | Frequency |
|---|---|---|---|
| 1 | AD-57213 | 3 | q1w |
| 2 | | 1.5 | (Monday) |
| 3 | | 0.75 | |
| 4 | | 1 | t.i.w. |
| 5 | | 0.5 | (M, W, F) |
| 6 | | 0.25 | |
| 7 | PBS | — | q1w |

(q1w: Once a week)

[0477] The results of the once a week (q1w) dosing as a percent knock-down of Serpinc1 protein levels from PBS are shown in FIG. 17 and the results of the three-time per week (t.i.w.) dosing as a percent knock-down of Serpinc1 protein levels from PBS are shown in FIG. 18.

[0478] As shown in FIGS. 17 and 18, repeat dosing of compound AD-57213 led to a dose-dependent, durable response, with some additive effect. Animals dosed with 3 mg/kg reached the nadir levels of >95% knock-down after 2 weekly doses whereas the lower two dose groups attained nadir after 3 weekly doses (˜90% knock-down for 1.5 mg/kg and ˜80% for 0.75 mg/kg).

[0479] To further study the different dosing regimens, in different groups, the same weekly dose was split and dosed three times a week, e.g., 1.5 mg/kg qlw was compared with 0.5 mg/kg tiw. As shown in FIG. 19, the cumulative weekly dose gave the same level of knock-down. For example, Serpinc1 levels achieved with 1.5 mg/kg (qlw) were equivalent to Serpinc1 levels achieved with 0.5 mg/kg administered three times a week.

### Example 11: Non-Human Primate Dosing of Serpinc1 siRNAs

[0480] Compound AD-57213 was tested for efficacy in non-human primates as outlined in Table 17. Serum Serpinc1 protein levels were determined at Days −14, −8, −4, Day 1 at 4 hours post-dosing, Days 2, 4, 8, 11, 15, 22, 29, 37, 44, 51, and 58.

TABLE 17
Non-Human Primate Dosing Experiment.

| | | | Dose | | | |
|---|---|---|---|---|---|---|
| Test | Group | | level | Route of | | |
| Article | Number | n | (mg/kg) | administration | Rationale | |
| AD54944 | 1 | 3 | 10 | SC | Parent | |
| | | | | | compound | |
| AD-57213 | 2* | 3 | 30 | SC | Dose | Similar to |
| | | | | | response | 3 × |
| | | | | | for the lead | 10 mpk |
| | 3 | 3 | 10 | SC | | Compare |
| | | | | | | compounds |
| | | | | | | at 10 mpk |
| | 4 | 3 | 3 | SC | | Dose curve |
| | 5 | 3 | 1 | SC | | |
| AD-57205 | 5 | 3 | 10 | SC | Same | Has less |
| | | | | | potency as | PS |
| | | | | | 57213 at | |
| | | | | | 10 mpk | |
| | | | | | in mice | |
| LNP- | 7 | 3 | 0.3 | IV | Test target | Positive |
| 55029 | | | | | | control for |
| | | | | | | target |
| | | | | | | knock- |
| | | | | | | down and |
| | | | | | | assays |

[0481] FIG. 20 shows the results of the single dose screen for all compounds tested as a group average of the relative serum Serpinc1 levels compared to pre-dosing Serpinc1 levels and demonstrates that all of the siRNAs tested effectively knock-down Serpinc1 protein levels.

[0482] FIG. 21 shows the results of the single dose screen for compoundAD-57213 as a group average of the relative serum Serpinc1 levels compared to pre-dosing Serpinc1 levels.

[0483] FIG. 22 shows the results of the single dose screen for all compounds tested as a group average of the relative serum Serpinc1 levels compared to pre-dosing Serpinc1 levels on Day 8.

[0484] Overall, the results demonstrate that there is dose-dependent knock-down of Serpinc1 protein levels with AD-57213 in non-human primates and that both AD-57213 and AD-57205 show improved potency over the parent compound AD-52444.

### Example 12: Non-Human Primate Dosing of a Therapeutic Serpinc1 siRNA

[0485] Compound AD-57213 was tested for efficacy in non-human primates. Cynomolgus monkeys were administered compound AD-57213 as outlined in Table 18 below. Plasma was collected at various time points after administration of AD-57213 and analyzed for antithrombin protein (Serpinc1) levels by ELISA.

TABLE 18
Study Design: AD-57213 pharmacology in nonhuman primates

| | | | Dose | | |
|---|---|---|---|---|---|
| Group | | | Level | Route of | Sample |
| Number | Test Article | N | (mg/kg) | Administration | Collection |
| 1 | AD-57213 | 3 | 1 | SC | Plasma for AT |
| 2 | | 3 | 3 | SC | protein and |
| 3 | | 3 | 10 | SC | thrombin |
| 4 | | 3 | 30 | SC | generation |

[0486] FIG. 23 shows the results of the single dose screen for compound AD-57213 as a group average of the relative serum Serpinc1 levels compared to the average of three pre-dose measurements. The results demonstrate dose dependent Serpinc1 silencing with approximately 50, 70, 80 and >90% silencing at 1, 3, 10 and 30 mg/kg, respectively. Data points represent group mean and error bars represent standard deviation.

[0487] FIGS. 24A-D show the relationship between relative serum Serpinc1 level and fold change in peak plasma thrombin level at a single A) 1 mg/kg, B) 3 mg/kg, C) 10 mg/kg, and D) 30 mg/kg dose of compound AD57213. Serpinc1 levels are represented relative to the average of three pre-dose measurements. Thrombin generation curves were generated from plasma samples collected at various time points using a Calibrated Automated Thrombinoscope (tissue factor=1 pM). Fold change in peak thrombin was calculated relative to the average peak thrombin value for two pre-dose values for each animal. Data points represent group mean and error bars represent standard deviation. FIG. 25 shows a consolidated scatterplot of fold change increase in peak thrombin as a function of relative Serpinc1 silencing.

[0488] Animals were also administered three weekly AD-57213 doses of 30 mg/kg and the Serpinc1 protein and mRNA levels were determined in blood samples collected from the animals. The results of these studies are presented in FIGS. 26A (Serpinc1 protein levels relative to prebleed levels) and 26B (Serpinc1 mRNA levels relative to GAPDH).

[0489] Overall, the results demonstrate that there is a durable, dose-dependent inhibition of Serpinc1 protein levels with compound AD-57213 in non-human primates that results in up to a 4-fold increase in thrombin generation.

### Example 13: Repeat Administration of a Serpinc1 SiRNA in Non-Human Primate Dosing

[0490] Compound AD-57213 was tested for efficacy and to evaluate the cumulative effect of the compound in non-human primates with a repeat administration protocol. Cynomolgus monkeys were administered compound AD-57213 at 0.5 mg/kg q1w; 1 mg/kg q2w (every other week), for 2 months and 1.5 mg/kg q1w; 3 mg/kg q2w for 6 weeks. Serum was collected at various time points as illustrated in FIG. 27 and analyzed for antithrombin protein level (SerpinC1) by ELISA. Antithrombin levels were represented relative to the average of three pre-dose measurements.

[0491] The first two dose groups with 0.5 mg/kg weekly cumulative dose led to 80% decrease in AT levels after 5 weeks. The latter two groups with 1.5 mg/kg the cumulative weekly dose led to >95% maximum knockdown. FIG. 27A shows the data from latter two groups. Animals receiving the 3 mg/kg dose were euthanized on Day 54 and animals receiving the 1.5 mg/kg q1w dose were administered an additional 6th weekly dose on day 36 and are being monitored for recovery to base line levels. FIG. 27B shows AT levels after 0.5 mg/kg cumulative weekly dose.

[0492] The data demonstrate that dose dependent antithrombin silencing was observed with all dosing regimens and achieved a steady-state level of suppression by day 25.

### Example 14: Correction in Hemostasis Following Administration of Compound AD-57213 in Hemophilic Mice

[0493] Hemophilic animals have less thrombin generation potential and cannot form stable clots. Reduction of antithrombin protein in these animals should help rebalance the hemostasis, increase the endogenous thrombin generating potential, and enable clot formation. This hypothesis was tested in hemophilia A and hemophilia B mice in the microvessel laser injury model accompanied with intravital imaging. Mice were injected with compound AD-57213 and injury was induced 10 days post-treatment. Accumulation of platelets and fibrin at the site of injury were visualized, recorded and quantified. FIG. 28A shows the median values of platelet accululation over time after laser surgery and FIG. 28B shows the median fibrin values from all inflicted injuries over time after laser surgery. As demonstrated by FIGS. 28A and 28B, compound AD-57213 injected at 1 mg/kg or 30 mg/kg led to platelet and fibrin deposition leading to clot formation in 100% of the injuries. Table 19 summarizes the results from two separate experiments with HA and HB animals.

TABLE 19

| | | | Stable | Percent AT |
|---|---|---|---|---|
| | Animals | Injuries | Thrombus | mRNA |
| Group | (N) | (N) | (N) | in liver |
| WT | 2 | 10 | 10 | 100% |
| HA + PBS | 2 | 13 | 0 | 100% |
| HA + 1 mg/kg ALN-AT3 | 4 | 20 | 20 | 50% |
| HA + 30 mg/kg ALN-AT3 | 4 | 20 | 20 | 5% |
| HB + PBS | 2 | 6 | 0 | 100% |
| HB + 30 mg/kg ALNAT3 | 2 | 6 | 6 | 5% |

### Example 15: In Vivo Efficacy of AD-57213 LNP Formulation

[0494] Compounds AD-55029 (unconjugated) and AD-57213 (conjugated to GalNAc) were formulated in a lipid nucleic acid particle (AF-11) and wild-type animals were administered doses of 0.03 mg/kg, 0.1 mg/kg and 0.3 mg/kg of these LNP formulated compounds. Luciferase (AF11-1955) was used as control.

[0495] Both compounds led to >95% knock-down at 0.3 mg/kg but the levels were maintained by AF11-57213 for 15 days versus 8 days by AF11-55029 (see FIG. 29). A similar difference in duration of action bwteen the two compounds was observed at the lower doses.

### Example 16: Design, Synthesis, and In Vitro Screening of Additional siRNAs siRNA Design

[0496] SiRNA duplexes, 19 nucleotides long for both the sense and antisense strand, were designed using the human SERPINC1 mRNA sequence set forth in GenBank Accession No. NM_000488.3. One thousand five hundred and eighty-one duplexes were initially identified that did not contain repeats longer than 7 nucleotides, spanning the entire 1599 nucleotide transcript. All 1581 duplexes were then scored for predicted efficacy according to a linear model that evaluates the nucleotide pair at each duplex position, and the dose and cell line to be used for screening. The duplexes were also matched against all transcripts in the human RefSeq collection using a custom brute force algorithm, and scored for lowest numbers of mismatches (per strand) to transcripts other than SERPINC1. Duplexes to be synthesized and screened were then selected from the 1581, according to the following scheme: Beginning at the 5′ end of the transcript, a duplex was selected within a “window” of every 10±2 nucleotides that
[0497] 1) had the highest predicted efficacy,
[0498] 2) had at least one mismatch in both strands to all transcripts other than SERPINCL
[0499] 3) had not already been synthesized and screened as part of other duplex sets.

[0500] If no duplex could be identified within a given window that satisfied all criteria, that window was skipped. One hundred and sixty-four duplexes were identified that satisfied these criteria.

[0501] A detailed list of Sepinc1 sense and antisense strand sequences is shown in Tables 20 and 21.

TABLE 20
AT3 (SERPINC1) unmodified sequences (The “Sense Sequence” column
sequences are disclosed as SEQ ID NOs: 979-1141, respectively,
in order of appearance, and the “Antisense Sequence” column
sequences are disclosed as SEQ ID NOs: 1142-1304, respectively,
in order of appearance)

| Duplex | Sense Oligo | | Antis Oligo | | Position in |
|---|---|---|---|---|---|
| Name | Name | Sense Sequence | Name | Antisense Sequence | NM_000488.3 |
| AD-59267.1 | A-120250.1 | GGAGAAGAAGGCAACUGAG | A-120251.1 | CUCAGUUGCCUUCUUCUCC | 293-311 |
| AD-59268.1 | A-120266.1 | UGACCAAGCUGGGUGCCUG | A-120267.1 | CAGGCACCCAGCUUGGUCA | 481-499 |
| AD-59269.1 | A-120282.1 | GGUUAACACCAUUUACUUC | A-120283.1 | GAAGUAAAUGGUGUUAACC | 860-878 |
| AD-59270.1 | A-120298.1 | GCUGGUUAACACCAUUUAC | A-120299.1 | GUAAAUGGUGUUAACCAGC | 857-875 |
| AD-59271.1 | A-120314.1 | UAAUGACACCCUCCAGCAA | A-120315.1 | UUGCUGGAGGGUGUCAUUA | 500-518 |
| AD-59272.1 | A-120330.1 | CGUGUUCAGCAUCUAUGAU | A-120331.1 | AUCAUAGAUGCUGAACACG | 952-970 |
| AD-59273.1 | A-120252.1 | UUGAGGACGGCUUCAGUUU | A-120253.1 | AAACUGAAGCCGUCCUCAA | 1189-1207 |
| AD-59274.1 | A-120268.1 | CGGCGUGUCUGGGAACUGU | A-120269.1 | ACAGUUCCCAGACACGCCG | 351-369 |
| AD-59275.1 | A-120284.1 | UUAACACCAUUUACUUCAA | A-120285.1 | UUGAAGUAAAUGGUGUUAA | 862-880 |
| AD-59276.1 | A-120300.1 | CCCUGAAAAGUCCAAACUC | A-120301.1 | GAGUUUGGACUUUUCAGGG | 1250-1268 |
| AD-59277.1 | A-120316.1 | CGAGAUGACCUCUAUGUCU | A-120317.1 | AGACAUAGAGGUCAUCUCG | 1290-1308 |
| AD-59278.1 | A-120332.1 | UCUACAAGGCUGAUGGAGA | A-120333.1 | UCUCCAUCAGCCUUGUAGA | 931-949 |
| AD-59279.1 | A-120254.1 | AGCUCACUGUUCUGGUGCU | A-120255.1 | AGCACCAGAACAGUGAGCU | 841-859 |
| AD-59280.1 | A-120270.1 | AGGAGCAGCUGCAAGACAU | A-120271.1 | AUGUCUUGCAGCUGCUCCU | 1210-1228 |
| AD-59281.1 | A-120286.1 | GCCACCAACCGGCGUGUCU | A-120287.1 | AGACACGCCGGUUGGUGGC | 342-360 |
| AD-59282.1 | A-120302.1 | CAGAACAGAAGAUCCCGGA | A-120303.1 | UCCGGGAUCUUCUGUUCUG | 322-340 |
| AD-59283.1 | A-120318.1 | CCUUGUCGAUCUGUUCAGC | A-120319.1 | GCUGAACAGAUCGACAAGG | 1232-1250 |
| AD-59284.1 | A-120334.1 | AGGCAAGUUCCGUUAUCGG | A-120335.1 | CCGAUAACGGAACUUGCCU | 980-998 |
| AD-59285.1 | A-120256.1 | UUUUGUCCUUGCUGCUCAU | A-120257.1 | AUGAGCAGCAAGGACAAAA | 172-190 |
| AD-59286.1 | A-120272.1 | AGACCUACCAGGACAUCAG | A-120273.1 | CUGAUGUCCUGGUAGGUCU | 682-700 |
| AD-59287.1 | A-120288.1 | AACUGAACUGCCGACUCUA | A-120289.1 | UAGAGUCGGCAGUUCAGUU | 589-607 |
| AD-59288.1 | A-120304.1 | CAUUUACUUCAAGGGCCUG | A-120305.1 | CAGGCCCUUGAAGUAAAUG | 869-887 |
| AD-59289.1 | A-120320.1 | CCCUGGACUUCAAGGAAAA | A-120321.1 | UUUUCCUUGAAGUCCAGGG | 730-748 |
| AD-59290.1 | A-120336.1 | AGCUGCAAGUACCGCUGUU | A-120337.1 | AACAGCGGUACUUGCAGCU | 1361-1379 |
| AD-59291.1 | A-120258.1 | ACACAAGGAAGGAACUGUU | A-120259.1 | AACAGUUCCUUCCUUGUGU | 913-931 |
| AD-59292.1 | A-120274.1 | GCAACUGAGGAUGAGGGCU | A-120275.1 | AGCCCUCAUCCUCAGUUGC | 303-321 |
| AD-59293.1 | A-120290.1 | GUAGCCAACCCUUGUGUUA | A-120291.1 | UAACACAAGGGUUGGCUAC | 1491-1509 |
| AD-59294.1 | A-120306.1 | GUUUGUGAACAGAAGUAAA | A-120307.1 | UUUACUUCUGUUCACAAAC | 1550-1568 |
| AD-59295.1 | A-120322.1 | GGGUGACUUUCAAGGCCAA | A-120323.1 | UUGGCCUUGAAAGUCACCC | 1411-1429 |
| AD-59296.1 | A-120338.1 | UUAUCGGCGCGUGGCUGAA | A-120339.1 | UUCAGCCACGCGCCGAUAA | 992-1010 |
| AD-59297.1 | A-120260.1 | CCACUUCUUCUUUGCCAAA | A-120261.1 | UUUGGCAAAGAAGAAGUGG | 572-590 |
| AD-59298.1 | A-120276.1 | AACACCAUUUACUUCAAGG | A-120277.1 | CCUUGAAGUAAAUGGUGUU | 864-882 |
| AD-59299.1 | A-120292.1 | GAUGGAGAGUCGUGUUCAG | A-120293.1 | CUGAACACGACUCUCCAUC | 942-960 |
| AD-59300.1 | A-120308.1 | CACCAUUUACUUCAAGGGC | A-120309.1 | GCCCUUGAAGUAAAUGGUG | 866-884 |
| AD-59301.1 | A-120324.1 | UUUACUUCAAGGGCCUGUG | A-120325.1 | CACAGGCCCUUGAAGUAAA | 871-889 |
| AD-59302.1 | A-120340.1 | UAAGAGAAGUUCCUCUGAA | A-120341.1 | UUCAGAGGAACUUCUCUUA | 1450-1468 |
| AD-59303.1 | A-120262.1 | GCGGGACAUUCCCAUGAAU | A-120263.1 | AUUCAUGGGAAUGUCCCGC | 251-269 |
| AD-59304.1 | A-120278.1 | UGCCCCACCCUGUCCUCUG | A-120279.1 | CAGAGGACAGGGUGGGGCA | 21-Mar |
| AD-59305.1 | A-120294.1 | UGGUUAACACCAUUUACUU | A-120295.1 | AAGUAAAUGGUGUUAACCA | 859-877 |
| AD-59306.1 | A-120310.1 | CGGAUUGCCUCAGAUCACA | A-120311.1 | UGUGAUCUGAGGCAAUCCG | 62-80 |
| AD-59307.1 | A-120326.1 | CCAGGACAUCAGUGAGUUG | A-120327.1 | CAACUCACUGAUGUCCUGG | 689-707 |
| AD-59308.1 | A-120342.1 | CCAGUUUUCAGGCGGAUUG | A-120343.1 | CAAUCCGCCUGAAAACUGG | 50-68 |
| AD-59309.1 | A-120264.1 | CACCAUAUCUGAGAAAACA | A-120265.1 | UGUUUUCUCAGAUAUGGUG | 542-560 |
| AD-59310.1 | A-120280.1 | AAGUAAAAAUAAAUACAAA | A-120281.1 | UUUGUAUUUAUUUUUACUU | 1562-1580 |
| AD-59311.1 | A-120296.1 | GCACCCAGGUGCUUGAGUU | A-120297.1 | AACUCAAGCACCUGGGUGC | 1012-1030 |
| AD-59312.1 | A-120312.1 | UAACACCAUUUACUUCAAG | A-120313.1 | CUUGAAGUAAAUGGUGUUA | 863-881 |
| AD-59313.1 | A-120328.1 | CCUUCAAAGGUGAUGACAU | A-120329.1 | AUGUCAUCACCUUUGAAGG | 1033-1051 |
| AD-59314.1 | A-120344.1 | CAAGGCCAAUUCCCGCUUU | A-120345.1 | AAAGCGGGAAUUGGCCUUG | 371-389 |
| AD-59315.1 | A-120360.1 | UCAGUUUGAAGGAGCAGCU | A-120361.1 | AGCUGCUCCUUCAAACUGA | 1201-1219 |
| AD-59316.1 | A-120376.1 | GGGACUGCGUGACCUGUCA | A-120377.1 | UGACAGGUCACGCAGUCCC | 199-217 |
| AD-59317.1 | A-120392.1 | UCAGCCAAUCGCCUUUUUG | A-120393.1 | CAAAAAGGCGAUUGGCUGA | 639-657 |
| AD-59318.1 | A-120408.1 | CCUCGGAAGCCAUCAAUGA | A-120409.1 | UCAUUGAUGGCUUCCGAGG | 823-841 |
| AD-59319.1 | A-120424.1 | GACAAUGAUAACAUUUUCC | A-120425.1 | GGAAAAUGUUAUCAUUGUC | 429-447 |
| AD-59320.1 | A-120346.1 | CUUAUUCUUUGCACCUCUU | A-120347.1 | AAGAGGUGCAAAGAAUAAG | 1521-1539 |
| AD-59321.1 | A-120362.1 | AUUGCUGGCCGUUCGCUAA | A-120363.1 | UUAGCGAACGGCCAGCAAU | 1383-1401 |
| AD-59322.1 | A-120378.1 | AAAUGAAGAAGGCAGUGAA | A-120379.1 | UUCACUGCCUUCUUCAUUU | 1340-1358 |
| AD-59323.1 | A-120394.1 | UGAGUUGGUAUAUGGAGCC | A-120395.1 | GGCUCCAUAUACCAACUCA | 701-719 |
| AD-59324.1 | A-120410.1 | UCCAGCAACUGAUGGAGGU | A-120411.1 | ACCUCCAUCAGUUGCUGGA | 511-529 |
| AD-59325.1 | A-120426.1 | AACUGUAACCUCUGGAAAA | A-120427.1 | UUUUCCAGAGGUUACAGUU | 140-158 |
| AD-59326.1 | A-120348.1 | UCAACAAAUGGGUGUCCAA | A-120349.1 | UUGGACACCCAUUUGUUGA | 772-790 |
| AD-59327.1 | A-120364.1 | GAUUAGCGGCCAUGUAUUC | A-120365.1 | GAAUACAUGGCCGCUAAUC | 109-127 |
| AD-59328.1 | A-120380.1 | GUGCUUGAGUUGCCCUUCA | A-120381.1 | UGAAGGGCAACUCAAGCAC | 1020-1038 |
| AD-59329.1 | A-120396.1 | UGCAGAAGGCCGAGAUGAC | A-120397.1 | GUCAUCUCGGCCUUCUGCA | 1280-1298 |
| AD-59330.1 | A-120412.1 | CUAUUUUUGGUUUGUGAAC | A-120413.1 | GUUCACAAACCAAAAAUAG | 1541-1559 |
| AD-59331.1 | A-120428.1 | CAGUGAAGCAGCUGCAAGU | A-120429.1 | ACUUGCAGCUGCUUCACUG | 1352-1370 |
| AD-59332.1 | A-120350.1 | GUGUCCAAUAAGACCGAAG | A-120351.1 | CUUCGGUCUUAUUGGACAC | 783-801 |
| AD-59333.1 | A-120366.1 | AUGAAUUGGAGGAGAUGAU | A-120367.1 | AUCAUCUCCUCCAAUUCAU | 1141-1159 |
| AD-59334.1 | A-120382.1 | AUCUAUGAUGUACCAGGAA | A-120383.1 | UUCCUGGUACAUCAUAGAU | 962-980 |
| AD-59335.1 | A-120398.1 | CCAUAAGGCAUUUCUUGAG | A-120399.1 | CUCAAGAAAUGCCUUAUGG | 1319-1337 |
| AD-59336.1 | A-120414.1 | AUGCAUUCCAUAAGGCAUU | A-120415.1 | AAUGCCUUAUGGAAUGCAU | 1312-1330 |
| AD-59337.1 | A-120430.1 | UGGUGCUGGUUAACACCAU | A-120431.1 | AUGGUGUUAACCAGCACCA | 853-871 |
| AD-59338.1 | A-120352.1 | AUCUGUUCAGCCCUGAAAA | A-120353.1 | UUUUCAGGGCUGAACAGAU | 1240-1258 |
| AD-59339.1 | A-120368.1 | AGAUGAUGCUGGUGGUCCA | A-120369.1 | UGGACCACCAGCAUCAUCU | 1153-1171 |
| AD-59340.1 | A-120384.1 | AUAUGGAGCCAAGCUCCAG | A-120385.1 | CUGGAGCUUGGCUCCAUAU | 710-728 |
| AD-59341.1 | A-120400.1 | CCGAAUCACCGAUGUCAUU | A-120401.1 | AAUGACAUCGGUGAUUCGG | 803-821 |
| AD-59342.1 | A-120416.1 | GCAGAGCAAUCCAGAGCGG | A-120417.1 | CCGCUCUGGAUUGCUCUGC | 750-768 |
| AD-59343.1 | A-120432.1 | ACACCAUUUACUUCAAGGG | A-120433.1 | CCCUUGAAGUAAAUGGUGU | 865-883 |
| AD-59344.1 | A-120354.1 | GUACCAGGAAGGCAAGUUC | A-120355.1 | GAACUUGCCUUCCUGGUAC | 971-989 |
| AD-59345.1 | A-120370.1 | UGCCCAAGCCUGAGAAGAG | A-120371.1 | CUCUUCUCAGGCUUGGGCA | 1069-1087 |
| AD-59346.1 | A-120386.1 | UUCUUUGCCAAACUGAACU | A-120387.1 | AGUUCAGUUUGGCAAAGAA | 579-597 |
| AD-59347.1 | A-120402.1 | UGGCCAAGGUAGAGAAGGA | A-120403.1 | UCCUUCUCUACCUUGGCCA | 1090-1108 |
| AD-59348.1 | A-120418.1 | UGCUGCAAGAGUGGCUGGA | A-120419.1 | UCCAGCCACUCUUGCAGCA | 1123-1141 |
| AD-59349.1 | A-120434.1 | CCAUGUGCAUUUACCGCUC | A-120435.1 | GAGCGGUAAAUGCACAUGG | 271-289 |
| AD-59350.1 | A-120356.1 | AGACAUGGGCCUUGUCGAU | A-120357.1 | AUCGACAAGGCCCAUGUCU | 1223-1241 |
| AD-59351.1 | A-120372.1 | UUUUGGAGACAAAUCCCUU | A-120373.1 | AAGGGAUUUGUCUCCAAAA | 653-671 |
| AD-59352.1 | A-120388.1 | GGAUGAGGGCUCAGAACAG | A-120389.1 | CUGUUCUGAGCCCUCAUCC | 311-329 |
| AD-59353.1 | A-120404.1 | CGGCUUUUGCUAUGACCAA | A-120405.1 | UUGGUCAUAGCAAAAGCCG | 469-487 |
| AD-59354.1 | A-120420.1 | AGCUCCAGCCCCUGGACUU | A-120421.1 | AAGUCCAGGGGCUGGAGCU | 721-739 |
| AD-59355.1 | A-120436.1 | CUGAUCAGAUCCACUUCUU | A-120437.1 | AAGAAGUGGAUCUGAUCAG | 562-580 |
| AD-59356.1 | A-120358.1 | UGCUGGUGGUCCACAUGCC | A-120359.1 | GGCAUGUGGACCACCAGCA | 1159-1177 |
| AD-59357.1 | A-120374.1 | GCGAGAUUUAGAGGAAAGA | A-120375.1 | UCUUUCCUCUAAAUCUCGC | 30-48 |
| AD-59358.1 | A-120390.1 | CUGCUCAUUGGCUUCUGGG | A-120391.1 | CCCAGAAGCCAAUGAGCAG | 183-201 |
| AD-59359.1 | A-120406.1 | CCUUCAAUGAGACCUACCA | A-120407.1 | UGGUAGGUCUCAUUGAAGG | 673-691 |
| AD-59360.1 | A-120422.1 | ACCAUUUACUUCAAGGGCC | A-120423.1 | GGCCCUUGAAGUAAAUGGU | 867-885 |
| AD-59587.1 | A-120438.1 | GCACCUCUUCCUAUUUUUG | A-120439.1 | CAAAAAUAGGAAGAGGUGC | 1531-1549 |
| AD-59588.1 | A-120454.1 | GUGGCUGAAGGCACCCAGG | A-120455.1 | CCUGGGUGCCUUCAGCCAC | 1002-1020 |
| AD-59589.1 | A-120470.1 | UCCGCAUUGAGGACGGCUU | A-120471.1 | AAGCCGUCCUCAAUGCGGA | 1183-1201 |
| AD-59590.1 | A-120486.1 | UGGACAUCUGCACAGCCAA | A-120487.1 | UUGGCUGUGCAGAUGUCCA | 229-247 |
| AD-59591.1 | A-120502.1 | GUCCAAACUCCCAGGUAUU | A-120503.1 | AAUACCUGGGAGUUUGGAC | 1259-1277 |
| AD-59592.1 | A-120518.1 | AGAAGGAACUCACCCCAGA | A-120519.1 | UCUGGGGUGAGUUCCUUCU | 1102-1120 |
| AD-59593.1 | A-120440.1 | UCUUGAGGUAAAUGAAGAA | A-120441.1 | UUCUUCAUUUACCUCAAGA | 1331-1349 |
| AD-59594.1 | A-120456.1 | AGCCCUGUGGACAUCUGCA | A-120457.1 | UGCAGAUGUCCACAGGGCU | 222-240 |
| AD-59595.1 | A-120472.1 | CAGAGCGGCCAUCAACAAA | A-120473.1 | UUUGUUGAUGGCCGCUCUG | 761-779 |
| AD-59596.1 | A-120488.1 | AUUUAAGUUUGACACCAUA | A-120489.1 | UAUGGUGUCAAACUUAAAU | 530-548 |
| AD-59597.1 | A-120504.1 | UGAGAAGAGCCUGGCCAAG | A-120505.1 | CUUGGCCAGGCUCUUCUCA | 1079-1097 |
| AD-59598.1 | A-120520.1 | UCACCAUGGUCCUCAUCUU | A-120521.1 | AAGAUGAGGACCAUGGUGA | 1051-1069 |
| AD-59599.1 | A-120442.1 | GGAAGGAACUGUUCUACAA | A-120443.1 | UUGUAGAACAGUUCCUUCC | 919-937 |
| AD-59600.1 | A-120458.1 | CUGGUUUUUAUAAGAGAAG | A-120459.1 | CUUCUCUUAUAAAAACCAG | 1440-1458 |
| AD-59601.1 | A-120474.1 | CUGGGUGCCUGUAAUGACA | A-120475.1 | UGUCAUUACAGGCACCCAG | 489-507 |
| AD-59602.1 | A-120490.1 | GUACCGCUGUUGUGAUUGC | A-120491.1 | GCAAUCACAACAGCGGUAC | 1369-1387 |
| AD-59603.1 | A-120506.1 | UCUAUCAGCACCUGGCAGA | A-120507.1 | UCUGCCAGGUGCUGAUAGA | 400-418 |
| AD-59604.1 | A-120522.1 | CUGGCAGAUUCCAAGAAUG | A-120523.1 | CAUUCUUGGAAUCUGCCAG | 411-429 |
| AD-59605.1 | A-120444.1 | CGAUGUCAUUCCCUCGGAA | A-120445.1 | UUCCGAGGGAAUGACAUCG | 812-830 |
| AD-59606.1 | A-120460.1 | GCUUCUGGGACUGCGUGAC | A-120461.1 | GUCACGCAGUCCCAGAAGC | 193-211 |
| AD-59607.1 | A-120476.1 | CCUGUCACGGGAGCCCUGU | A-120477.1 | ACAGGGCUCCCGUGACAGG | 211-229 |
| AD-59608.1 | A-120492.1 | AUUUACUUCAAGGGCCUGU | A-120493.1 | ACAGGCCCUUGAAGUAAAU | 870-888 |
| AD-59609.1 | A-120508.1 | UGCUACCACUUUCUAUCAG | A-120509.1 | CUGAUAGAAAGUGGUAGCA | 389-407 |
| AD-59610.1 | A-120524.1 | GGAACUGUCCAAGGCCAAU | A-120525.1 | AUUGGCCUUGGACAGUUCC | 362-380 |
| AD-59611.1 | A-120446.1 | ACAAAUCCUCCAAGUUAGU | A-120447.1 | ACUAACUUGGAGGAUUUGU | 619-637 |
| AD-59612.1 | A-120462.1 | AUUUACCGCUCCCCGGAGA | A-120463.1 | UCUCCGGGGAGCGGUAAAU | 279-297 |
| AD-59613.1 | A-120478.1 | ACCCCUGAGUAUCUCCACG | A-120479.1 | CGUGGAGAUACUCAGGGGU | 452-470 |
| AD-59614.1 | A-120494.1 | CACUAUCUCCACUUGCCCA | A-120495.1 | UGGGCAAGUGGAGAUAGUG | 79-97 |
| AD-59615.1 | A-120510.1 | AAAUACAAACUACUUCCAU | A-120511.1 | AUGGAAGUAGUUUGUAUUU | 1572-1590 |
| AD-59616.1 | A-120526.1 | CUGGUUAACACCAUUUACU | A-120527.1 | AGUAAAUGGUGUUAACCAG | 858-876 |
| AD-59617.1 | A-120448.1 | UCAUCUUGCCCAAGCCUGA | A-120449.1 | UCAGGCUUGGGCAAGAUGA | 1063-1081 |
| AD-59618.1 | A-120464.1 | CCUCAGAUCACACUAUCUC | A-120465.1 | GAGAUAGUGUGAUCUGAGG | 69-87 |
| AD-59619.1 | A-120480.1 | CUGUCCUCUGGAACCUCUG | A-120481.1 | CAGAGGUUCCAGAGGACAG | 30-Dec |
| AD-59620.1 | A-120496.1 | CCCUGUGGAAGAUUAGCGG | A-120497.1 | CCGCUAAUCUUCCACAGGG | 99-117 |
| AD-59621.1 | A-120512.1 | AUCUCCACGGCUUUUGCUA | A-120513.1 | UAGCAAAAGCCGUGGAGAU | 462-480 |
| AD-59622.1 | A-120528.1 | GUGGCUGGAUGAAUUGGAG | A-120529.1 | CUCCAAUUCAUCCAGCCAC | 1133-1151 |
| AD-59623.1 | A-120450.1 | CAAGUUAGUAUCAGCCAAU | A-120451.1 | AUUGGCUGAUACUAACUUG | 629-647 |
| AD-59624.1 | A-120466.1 | GUGAUGACAUCACCAUGGU | A-120467.1 | ACCAUGGUGAUGUCAUCAC | 1042-1060 |
| AD-59625.1 | A-120482.1 | UUCCAAGAAUGACAAUGAU | A-120483.1 | AUCAUUGUCAUUCUUGGAA | 419-437 |
| AD-59626.1 | A-120498.1 | UGAUGGAGGUAUUUAAGUU | A-120499.1 | AACUUAAAUACCUCCAUCA | 520-538 |
| AD-59627.1 | A-120514.1 | GUAUUCCAAUGUGAUAGGA | A-120515.1 | UCCUAUCACAUUGGAAUAC | 122-140 |
| AD-59628.1 | A-120530.1 | CAGCCAAGCCGCGGGACAU | A-120531.1 | AUGUCCCGCGGCUUGGCUG | 241-259 |
| AD-59629.1 | A-120452.1 | CAUGCCCCGCUUCCGCAUU | A-120453.1 | AAUGCGGAAGCGGGGCAUG | 1172-1190 |
| AD-59630.1 | A-120468.1 | AUGUGAUAGGAACUGUAAC | A-120469.1 | GUUACAGUUCCUAUCACAU | 130-148 |
| AD-59631.1 | A-120484.1 | ACAAAUCCCUUACCUUCAA | A-120485.1 | UUGAAGGUAAGGGAUUUGU | 661-679 |
| AD-59632.1 | A-120500.1 | AGGUUUAUCUUUUGUCCUU | A-120501.1 | AAGGACAAAAGAUAAACCU | 163-181 |
| AD-59633.1 | A-120516.1 | AGAUCCCGGAGGCCACCAA | A-120517.1 | UUGGUGGCCUCCGGGAUCU | 331-349 |
| AD-59634.1 | A-120532.1 | ACAUUUUCCUGUCACCCCU | A-120533.1 | AGGGGUGACAGGAAAAUGU | 439-457 |
| AD-59635.1 | A-120548.1 | GGCCUUUCCUGGUUUUUAU | A-120549.1 | AUAAAAACCAGGAAAGGCC | 1432-1450 |
| AD-59636.1 | A-120564.1 | UUGUGUUAAGUAAAAUGUU | A-120565.1 | AACAUUUUACUUAACACAA | 1502-1520 |
| AD-59637.1 | A-120534.1 | CAAGGAAAAUGCAGAGCAA | A-120535.1 | UUGCUCUGCAUUUUCCUUG | 740-758 |
| AD-59638.1 | A-120550.1 | CUGAGAAAACAUCUGAUCA | A-120551.1 | UGAUCAGAUGUUUUCUCAG | 550-568 |
| AD-59639.1 | A-120566.1 | UUACUUCAAGGGCCUGUGG | A-120567.1 | CCACAGGCCCUUGAAGUAA | 872-890 |
| AD-59640.1 | A-120536.1 | ACCCCAACAGGGUGACUUU | A-120537.1 | AAAGUCACCCUGUUGGGGU | 1402-1420 |
| AD-59641.1 | A-120552.1 | CCAGGUAUUGUUGCAGAAG | A-120553.1 | CUUCUGCAACAAUACCUGG | 1269-1287 |
| AD-59642.1 | A-120568.1 | GCCUGUGGAAGUCAAAGUU | A-120569.1 | AACUUUGACUUCCACAGGC | 883-901 |
| AD-59643.1 | A-120538.1 | UGGAACCUCUGCGAGAUUU | A-120539.1 | AAAUCUCGCAGAGGUUCCA | 20-38 |
| AD-59644.1 | A-120554.1 | AGCCCUGAGAACACAAGGA | A-120555.1 | UCCUUGUGUUCUCAGGGCU | 903-921 |
| AD-59645.1 | A-120570.1 | CUCUAUGUCUCAGAUGCAU | A-120571.1 | AUGCAUCUGAGACAUAGAG | 1299-1317 |
| AD-59646.1 | A-120540.1 | AAGACCGAAGGCCGAAUCA | A-120541.1 | UGAUUCGGCCUUCGGUCUU | 792-810 |
| AD-59647.1 | A-120556.1 | UAAAAUGUUCUUAUUCUUU | A-120557.1 | AAAGAAUAAGAACAUUUUA | 1512-1530 |
| AD-59648.1 | A-120572.1 | UCUGGAAAAAGGAAGGUUU | A-120573.1 | AAACCUUCCUUUUUCCAGA | 150-168 |
| AD-59649.1 | A-120542.1 | UUCAAGGCCAACAGGCCUU | A-120543.1 | AAGGCCUGUUGGCCUUGAA | 1419-1437 |
| AD-59650.1 | A-120558.1 | GAAGUCAAAGUUCAGCCCU | A-120559.1 | AGGGCUGAACUUUGACUUC | 890-908 |
| AD-59651.1 | A-120574.1 | CCAUCAAUGAGCUCACUGU | A-120575.1 | ACAGUGAGCUCAUUGAUGG | 832-850 |
| AD-59652.1 | A-120544.1 | CUCUGAACACUAUUAUCUU | A-120545.1 | AAGAUAAUAGUGUUCAGAG | 1462-1480 |
| AD-59653.1 | A-120560.1 | UGCUGGUUAACACCAUUUA | A-120561.1 | UAAAUGGUGUUAACCAGCA | 856-874 |
| AD-59654.1 | A-120546.1 | AGAGGAAAGAACCAGUUUU | A-120547.1 | AAAACUGGUUCUUUCCUCU | 39-57 |
| AD-59655.1 | A-120562.1 | UGCCCAGCCCUGUGGAAGA | A-120563.1 | UCUUCCACAGGGCUGGGCA | 92-110 |

TABLE 21
AT3 (SERPINC1) modified sequences (The “Sense Sequence” column
sequences are disclosed as SEQ ID NOs: 1305-1467, respectively,
in order of appearance, and the “Antisense Sequence” column
sequences are disclosed as SEQ ID NOs: 1468-1630, respectively,
in order of appearance)

| | Sense | | Antis | |
|---|---|---|---|---|
| Duplex | Oligo | | Oligo | |
| Name | Name | oligoSeq | Name | oligoSeq |
| AD-59267.1 | A-120250.1 | GGAGAAGAAGGCAACUGAGdTdT | A-120251.1 | CUCAGUUGCCUUCUUCUCCdTdT |
| AD-59268.1 | A-120266.1 | UGACCAAGCUGGGUGCCUGdTdT | A-120267.1 | CAGGCACCCAGCUUGGUCAdTdT |
| AD-59269.1 | A-120282.1 | GGUUAACACCAUUUACUUCdTdT | A-120283.1 | GAAGUAAAUGGUGUUAACCdTdT |
| AD-59270.1 | A-120298.1 | GCUGGUUAACACCAUUUACdTdT | A-120299.1 | GUAAAUGGUGUUAACCAGCdTdT |
| AD-59271.1 | A-120314.1 | UAAUGACACCCUCCAGCAAdTdT | A-120315.1 | UUGCUGGAGGGUGUCAUUAdTdT |
| AD-59272.1 | A-120330.1 | CGUGUUCAGCAUCUAUGAUdTdT | A-120331.1 | AUCAUAGAUGCUGAACACGdTdT |
| AD-59273.1 | A-120252.1 | UUGAGGACGGCUUCAGUUUdTdT | A-120253.1 | AAACUGAAGCCGUCCUCAAdTdT |
| AD-59274.1 | A-120268.1 | CGGCGUGUCUGGGAACUGUdTdT | A-120269.1 | ACAGUUCCCAGACACGCCGdTdT |
| AD-59275.1 | A-120284.1 | UUAACACCAUUUACUUCAAdTdT | A-120285.1 | UUGAAGUAAAUGGUGUUAAdTdT |
| AD-59276.1 | A-120300.1 | CCCUGAAAAGUCCAAACUCdTdT | A-120301.1 | GAGUUUGGACUUUUCAGGGdTdT |
| AD-59277.1 | A-120316.1 | CGAGAUGACCUCUAUGUCUdTdT | A-120317.1 | AGACAUAGAGGUCAUCUCGdTdT |
| AD-59278.1 | A-120332.1 | UCUACAAGGCUGAUGGAGAdTdT | A-120333.1 | UCUCCAUCAGCCUUGUAGAdTdT |
| AD-59279.1 | A-120254.1 | AGCUCACUGUUCUGGUGCUdTdT | A-120255.1 | AGCACCAGAACAGUGAGCUdTdT |
| AD-59280.1 | A-120270.1 | AGGAGCAGCUGCAAGACAUdTdT | A-120271.1 | AUGUCUUGCAGCUGCUCCUdTdT |
| AD-59281.1 | A-120286.1 | GCCACCAACCGGCGUGUCUdTdT | A-120287.1 | AGACACGCCGGUUGGUGGCdTdT |
| AD-59282.1 | A-120302.1 | CAGAACAGAAGAUCCCGGAdTdT | A-120303.1 | UCCGGGAUCUUCUGUUCUGdTdT |
| AD-59283.1 | A-120318.1 | CCUUGUCGAUCUGUUCAGCdTdT | A-120319.1 | GCUGAACAGAUCGACAAGGdTdT |
| AD-59284.1 | A-120334.1 | AGGCAAGUUCCGUUAUCGGdTdT | A-120335.1 | CCGAUAACGGAACUUGCCUdTdT |
| AD-59285.1 | A-120256.1 | UUUUGUCCUUGCUGCUCAUdTdT | A-120257.1 | AUGAGCAGCAAGGACAAAAdTdT |
| AD-59286.1 | A-120272.1 | AGACCUACCAGGACAUCAGdTdT | A-120273.1 | CUGAUGUCCUGGUAGGUCUdTdT |
| AD-59287.1 | A-120288.1 | AACUGAACUGCCGACUCUAdTdT | A-120289.1 | UAGAGUCGGCAGUUCAGUUdTdT |
| AD-59288.1 | A-120304.1 | CAUUUACUUCAAGGGCCUGdTdT | A-120305.1 | CAGGCCCUUGAAGUAAAUGdTdT |
| AD-59289.1 | A-120320.1 | CCCUGGACUUCAAGGAAAAdTdT | A-120321.1 | UUUUCCUUGAAGUCCAGGGdTdT |
| AD-59290.1 | A-120336.1 | AGCUGCAAGUACCGCUGUUdTdT | A-120337.1 | AACAGCGGUACUUGCAGCUdTdT |
| AD-59291.1 | A-120258.1 | ACACAAGGAAGGAACUGUUdTdT | A-120259.1 | AACAGUUCCUUCCUUGUGUdTdT |
| AD-59292.1 | A-120274.1 | GCAACUGAGGAUGAGGGCUdTdT | A-120275.1 | AGCCCUCAUCCUCAGUUGCdTdT |
| AD-59293.1 | A-120290.1 | GUAGCCAACCCUUGUGUUAdTdT | A-120291.1 | UAACACAAGGGUUGGCUACdTdT |
| AD-59294.1 | A-120306.1 | GUUUGUGAACAGAAGUAAAdTdT | A-120307.1 | UUUACUUCUGUUCACAAACdTdT |
| AD-59295.1 | A-120322.1 | GGGUGACUUUCAAGGCCAAdTdT | A-120323.1 | UUGGCCUUGAAAGUCACCCdTdT |
| AD-59296.1 | A-120338.1 | UUAUCGGCGCGUGGCUGAAdTdT | A-120339.1 | UUCAGCCACGCGCCGAUAAdTdT |
| AD-59297.1 | A-120260.1 | CCACUUCUUCUUUGCCAAAdTdT | A-120261.1 | UUUGGCAAAGAAGAAGUGGdTdT |
| AD-59298.1 | A-120276.1 | AACACCAUUUACUUCAAGGdTdT | A-120277.1 | CCUUGAAGUAAAUGGUGUUdTdT |
| AD-59299.1 | A-120292.1 | GAUGGAGAGUCGUGUUCAGdTdT | A-120293.1 | CUGAACACGACUCUCCAUCdTdT |
| AD-59300.1 | A-120308.1 | CACCAUUUACUUCAAGGGCdTdT | A-120309.1 | GCCCUUGAAGUAAAUGGUGdTdT |
| AD-59301.1 | A-120324.1 | UUUACUUCAAGGGCCUGUGdTdT | A-120325.1 | CACAGGCCCUUGAAGUAAAdTdT |
| AD-59302.1 | A-120340.1 | UAAGAGAAGUUCCUCUGAAdTdT | A-120341.1 | UUCAGAGGAACUUCUCUUAdTdT |
| AD-59303.1 | A-120262.1 | GCGGGACAUUCCCAUGAAUdTdT | A-120263.1 | AUUCAUGGGAAUGUCCCGCdTdT |
| AD-59304.1 | A-120278.1 | UGCCCCACCCUGUCCUCUGdTdT | A-120279.1 | CAGAGGACAGGGUGGGGCAdTdT |
| AD-59305.1 | A-120294.1 | UGGUUAACACCAUUUACUUdTdT | A-120295.1 | AAGUAAAUGGUGUUAACCAdTdT |
| AD-59306.1 | A-120310.1 | CGGAUUGCCUCAGAUCACAdTdT | A-120311.1 | UGUGAUCUGAGGCAAUCCGdTdT |
| AD-59307.1 | A-120326.1 | CCAGGACAUCAGUGAGUUGdTdT | A-120327.1 | CAACUCACUGAUGUCCUGGdTdT |
| AD-59308.1 | A-120342.1 | CCAGUUUUCAGGCGGAUUGdTdT | A-120343.1 | CAAUCCGCCUGAAAACUGGdTdT |
| AD-59309.1 | A-120264.1 | CACCAUAUCUGAGAAAACAdTdT | A-120265.1 | UGUUUUCUCAGAUAUGGUGdTdT |
| AD-59310.1 | A-120280.1 | AAGUAAAAAUAAAUACAAAdTdT | A-120281.1 | UUUGUAUUUAUUUUUACUUdTdT |
| AD-59311.1 | A-120296.1 | GCACCCAGGUGCUUGAGUUdTdT | A-120297.1 | AACUCAAGCACCUGGGUGCdTdT |
| AD-59312.1 | A-120312.1 | UAACACCAUUUACUUCAAGdTdT | A-120313.1 | CUUGAAGUAAAUGGUGUUAdTdT |
| AD-59313.1 | A-120328.1 | CCUUCAAAGGUGAUGACAUdTdT | A-120329.1 | AUGUCAUCACCUUUGAAGGdTdT |
| AD-59314.1 | A-120344.1 | CAAGGCCAAUUCCCGCUUUdTdT | A-120345.1 | AAAGCGGGAAUUGGCCUUGdTdT |
| AD-59315.1 | A-120360.1 | UCAGUUUGAAGGAGCAGCUdTdT | A-120361.1 | AGCUGCUCCUUCAAACUGAdTdT |
| AD-59316.1 | A-120376.1 | GGGACUGCGUGACCUGUCAdTdT | A-120377.1 | UGACAGGUCACGCAGUCCCdTdT |
| AD-59317.1 | A-120392.1 | UCAGCCAAUCGCCUUUUUGdTdT | A-120393.1 | CAAAAAGGCGAUUGGCUGAdTdT |
| AD-59318.1 | A-120408.1 | CCUCGGAAGCCAUCAAUGAdTdT | A-120409.1 | UCAUUGAUGGCUUCCGAGGdTdT |
| AD-59319.1 | A-120424.1 | GACAAUGAUAACAUUUUCCdTdT | A-120425.1 | GGAAAAUGUUAUCAUUGUCdTdT |
| AD-59320.1 | A-120346.1 | CUUAUUCUUUGCACCUCUUdTdT | A-120347.1 | AAGAGGUGCAAAGAAUAAGdTdT |
| AD-59321.1 | A-120362.1 | AUUGCUGGCCGUUCGCUAAdTdT | A-120363.1 | UUAGCGAACGGCCAGCAAUdTdT |
| AD-59322.1 | A-120378.1 | AAAUGAAGAAGGCAGUGAAdTdT | A-120379.1 | UUCACUGCCUUCUUCAUUUdTdT |
| AD-59323.1 | A-120394.1 | UGAGUUGGUAUAUGGAGCCdTdT | A-120395.1 | GGCUCCAUAUACCAACUCAdTdT |
| AD-59324.1 | A-120410.1 | UCCAGCAACUGAUGGAGGUdTdT | A-120411.1 | ACCUCCAUCAGUUGCUGGAdTdT |
| AD-59325.1 | A-120426.1 | AACUGUAACCUCUGGAAAAdTdT | A-120427.1 | UUUUCCAGAGGUUACAGUUdTdT |
| AD-59326.1 | A-120348.1 | UCAACAAAUGGGUGUCCAAdTdT | A-120349.1 | UUGGACACCCAUUUGUUGAdTdT |
| AD-59327.1 | A-120364.1 | GAUUAGCGGCCAUGUAUUCdTdT | A-120365.1 | GAAUACAUGGCCGCUAAUCdTdT |
| AD-59328.1 | A-120380.1 | GUGCUUGAGUUGCCCUUCAdTdT | A-120381.1 | UGAAGGGCAACUCAAGCACdTdT |
| AD-59329.1 | A-120396.1 | UGCAGAAGGCCGAGAUGACdTdT | A-120397.1 | GUCAUCUCGGCCUUCUGCAdTdT |
| AD-59330.1 | A-120412.1 | CUAUUUUUGGUUUGUGAACdTdT | A-120413.1 | GUUCACAAACCAAAAAUAGdTdT |
| AD-59331.1 | A-120428.1 | CAGUGAAGCAGCUGCAAGUdTdT | A-120429.1 | ACUUGCAGCUGCUUCACUGdTdT |
| AD-59332.1 | A-120350.1 | GUGUCCAAUAAGACCGAAGdTdT | A-120351.1 | CUUCGGUCUUAUUGGACACdTdT |
| AD-59333.1 | A-120366.1 | AUGAAUUGGAGGAGAUGAUdTdT | A-120367.1 | AUCAUCUCCUCCAAUUCAUdTdT |
| AD-59334.1 | A-120382.1 | AUCUAUGAUGUACCAGGAAdTdT | A-120383.1 | UUCCUGGUACAUCAUAGAUdTdT |
| AD-59335.1 | A-120398.1 | CCAUAAGGCAUUUCUUGAGdTdT | A-120399.1 | CUCAAGAAAUGCCUUAUGGdTdT |
| AD-59336.1 | A-120414.1 | AUGCAUUCCAUAAGGCAUUdTdT | A-120415.1 | AAUGCCUUAUGGAAUGCAUdTdT |
| AD-59337.1 | A-120430.1 | UGGUGCUGGUUAACACCAUdTdT | A-120431.1 | AUGGUGUUAACCAGCACCAdTdT |
| AD-59338.1 | A-120352.1 | AUCUGUUCAGCCCUGAAAAdTdT | A-120353.1 | UUUUCAGGGCUGAACAGAUdTdT |
| AD-59339.1 | A-120368.1 | AGAUGAUGCUGGUGGUCCAdTdT | A-120369.1 | UGGACCACCAGCAUCAUCUdTdT |
| AD-59340.1 | A-120384.1 | AUAUGGAGCCAAGCUCCAGdTdT | A-120385.1 | CUGGAGCUUGGCUCCAUAUdTdT |
| AD-59341.1 | A-120400.1 | CCGAAUCACCGAUGUCAUUdTdT | A-120401.1 | AAUGACAUCGGUGAUUCGGdTdT |
| AD-59342.1 | A-120416.1 | GCAGAGCAAUCCAGAGCGGdTdT | A-120417.1 | CCGCUCUGGAUUGCUCUGCdTdT |
| AD-59343.1 | A-120432.1 | ACACCAUUUACUUCAAGGGdTdT | A-120433.1 | CCCUUGAAGUAAAUGGUGUdTdT |
| AD-59344.1 | A-120354.1 | GUACCAGGAAGGCAAGUUCdTdT | A-120355.1 | GAACUUGCCUUCCUGGUACdTdT |
| AD-59345.1 | A-120370.1 | UGCCCAAGCCUGAGAAGAGdTdT | A-120371.1 | CUCUUCUCAGGCUUGGGCAdTdT |
| AD-59346.1 | A-120386.1 | UUCUUUGCCAAACUGAACUdTdT | A-120387.1 | AGUUCAGUUUGGCAAAGAAdTdT |
| AD-59347.1 | A-120402.1 | UGGCCAAGGUAGAGAAGGAdTdT | A-120403.1 | UCCUUCUCUACCUUGGCCAdTdT |
| AD-59348.1 | A-120418.1 | UGCUGCAAGAGUGGCUGGAdTdT | A-120419.1 | UCCAGCCACUCUUGCAGCAdTdT |
| AD-59349.1 | A-120434.1 | CCAUGUGCAUUUACCGCUCdTdT | A-120435.1 | GAGCGGUAAAUGCACAUGGdTdT |
| AD-59350.1 | A-120356.1 | AGACAUGGGCCUUGUCGAUdTdT | A-120357.1 | AUCGACAAGGCCCAUGUCUdTdT |
| AD-59351.1 | A-120372.1 | UUUUGGAGACAAAUCCCUUdTdT | A-120373.1 | AAGGGAUUUGUCUCCAAAAdTdT |
| AD-59352.1 | A-120388.1 | GGAUGAGGGCUCAGAACAGdTdT | A-120389.1 | CUGUUCUGAGCCCUCAUCCdTdT |
| AD-59353.1 | A-120404.1 | CGGCUUUUGCUAUGACCAAdTdT | A-120405.1 | UUGGUCAUAGCAAAAGCCGdTdT |
| AD-59354.1 | A-120420.1 | AGCUCCAGCCCCUGGACUUdTdT | A-120421.1 | AAGUCCAGGGGCUGGAGCUdTdT |
| AD-59355.1 | A-120436.1 | CUGAUCAGAUCCACUUCUUdTdT | A-120437.1 | AAGAAGUGGAUCUGAUCAGdTdT |
| AD-59356.1 | A-120358.1 | UGCUGGUGGUCCACAUGCCdTdT | A-120359.1 | GGCAUGUGGACCACCAGCAdTdT |
| AD-59357.1 | A-120374.1 | GCGAGAUUUAGAGGAAAGAdTdT | A-120375.1 | UCUUUCCUCUAAAUCUCGCdTdT |
| AD-59358.1 | A-120390.1 | CUGCUCAUUGGCUUCUGGGdTdT | A-120391.1 | CCCAGAAGCCAAUGAGCAGdTdT |
| AD-59359.1 | A-120406.1 | CCUUCAAUGAGACCUACCAdTdT | A-120407.1 | UGGUAGGUCUCAUUGAAGGdTdT |
| AD-59360.1 | A-120422.1 | ACCAUUUACUUCAAGGGCCdTdT | A-120423.1 | GGCCCUUGAAGUAAAUGGUdTdT |
| AD-59587.1 | A-120438.1 | GCACCUCUUCCUAUUUUUGdTdT | A-120439.1 | CAAAAAUAGGAAGAGGUGCdTdT |
| AD-59588.1 | A-120454.1 | GUGGCUGAAGGCACCCAGGdTdT | A-120455.1 | CCUGGGUGCCUUCAGCCACdTdT |
| AD-59589.1 | A-120470.1 | UCCGCAUUGAGGACGGCUUdTdT | A-120471.1 | AAGCCGUCCUCAAUGCGGAdTdT |
| AD-59590.1 | A-120486.1 | UGGACAUCUGCACAGCCAAdTdT | A-120487.1 | UUGGCUGUGCAGAUGUCCAdTdT |
| AD-59591.1 | A-120502.1 | GUCCAAACUCCCAGGUAUUdTdT | A-120503.1 | AAUACCUGGGAGUUUGGACdTdT |
| AD-59592.1 | A-120518.1 | AGAAGGAACUCACCCCAGAdTdT | A-120519.1 | UCUGGGGUGAGUUCCUUCUdTdT |
| AD-59593.1 | A-120440.1 | UCUUGAGGUAAAUGAAGAAdTdT | A-120441.1 | UUCUUCAUUUACCUCAAGAdTdT |
| AD-59594.1 | A-120456.1 | AGCCCUGUGGACAUCUGCAdTdT | A-120457.1 | UGCAGAUGUCCACAGGGCUdTdT |
| AD-59595.1 | A-120472.1 | CAGAGCGGCCAUCAACAAAdTdT | A-120473.1 | UUUGUUGAUGGCCGCUCUGdTdT |
| AD-59596.1 | A-120488.1 | AUUUAAGUUUGACACCAUAdTdT | A-120489.1 | UAUGGUGUCAAACUUAAAUdTdT |
| AD-59597.1 | A-120504.1 | UGAGAAGAGCCUGGCCAAGdTdT | A-120505.1 | CUUGGCCAGGCUCUUCUCAdTdT |
| AD-59598.1 | A-120520.1 | UCACCAUGGUCCUCAUCUUdTdT | A-120521.1 | AAGAUGAGGACCAUGGUGAdTdT |
| AD-59599.1 | A-120442.1 | GGAAGGAACUGUUCUACAAdTdT | A-120443.1 | UUGUAGAACAGUUCCUUCCdTdT |
| AD-59600.1 | A-120458.1 | CUGGUUUUUAUAAGAGAAGdTdT | A-120459.1 | CUUCUCUUAUAAAAACCAGdTdT |
| AD-59601.1 | A-120474.1 | CUGGGUGCCUGUAAUGACAdTdT | A-120475.1 | UGUCAUUACAGGCACCCAGdTdT |
| AD-59602.1 | A-120490.1 | GUACCGCUGUUGUGAUUGCdTdT | A-120491.1 | GCAAUCACAACAGCGGUACdTdT |
| AD-59603.1 | A-120506.1 | UCUAUCAGCACCUGGCAGAdTdT | A-120507.1 | UCUGCCAGGUGCUGAUAGAdTdT |
| AD-59604.1 | A-120522.1 | CUGGCAGAUUCCAAGAAUGdTdT | A-120523.1 | CAUUCUUGGAAUCUGCCAGdTdT |
| AD-59605.1 | A-120444.1 | CGAUGUCAUUCCCUCGGAAdTdT | A-120445.1 | UUCCGAGGGAAUGACAUCGdTdT |
| AD-59606.1 | A-120460.1 | GCUUCUGGGACUGCGUGACdTdT | A-120461.1 | GUCACGCAGUCCCAGAAGCdTdT |
| AD-59607.1 | A-120476.1 | CCUGUCACGGGAGCCCUGUdTdT | A-120477.1 | ACAGGGCUCCCGUGACAGGdTdT |
| AD-59608.1 | A-120492.1 | AUUUACUUCAAGGGCCUGUdTdT | A-120493.1 | ACAGGCCCUUGAAGUAAAUdTdT |
| AD-59609.1 | A-120508.1 | UGCUACCACUUUCUAUCAGdTdT | A-120509.1 | CUGAUAGAAAGUGGUAGCAdTdT |
| AD-59610.1 | A-120524.1 | GGAACUGUCCAAGGCCAAUdTdT | A-120525.1 | AUUGGCCUUGGACAGUUCCdTdT |
| AD-59611.1 | A-120446.1 | ACAAAUCCUCCAAGUUAGUdTdT | A-120447.1 | ACUAACUUGGAGGAUUUGUdTdT |
| AD-59612.1 | A-120462.1 | AUUUACCGCUCCCCGGAGAdTdT | A-120463.1 | UCUCCGGGGAGCGGUAAAUdTdT |
| AD-59613.1 | A-120478.1 | ACCCCUGAGUAUCUCCACGdTdT | A-120479.1 | CGUGGAGAUACUCAGGGGUdTdT |
| AD-59614.1 | A-120494.1 | CACUAUCUCCACUUGCCCAdTdT | A-120495.1 | UGGGCAAGUGGAGAUAGUGdTdT |
| AD-59615.1 | A-120510.1 | AAAUACAAACUACUUCCAUdTdT | A-120511.1 | AUGGAAGUAGUUUGUAUUUdTdT |
| AD-59616.1 | A-120526.1 | CUGGUUAACACCAUUUACUdTdT | A-120527.1 | AGUAAAUGGUGUUAACCAGdTdT |
| AD-59617.1 | A-120448.1 | UCAUCUUGCCCAAGCCUGAdTdT | A-120449.1 | UCAGGCUUGGGCAAGAUGAdTdT |
| AD-59618.1 | A-120464.1 | CCUCAGAUCACACUAUCUCdTdT | A-120465.1 | GAGAUAGUGUGAUCUGAGGdTdT |
| AD-59619.1 | A-120480.1 | CUGUCCUCUGGAACCUCUGdTdT | A-120481.1 | CAGAGGUUCCAGAGGACAGdTdT |
| AD-59620.1 | A-120496.1 | CCCUGUGGAAGAUUAGCGGdTdT | A-120497.1 | CCGCUAAUCUUCCACAGGGdTdT |
| AD-59621.1 | A-120512.1 | AUCUCCACGGCUUUUGCUAdTdT | A-120513.1 | UAGCAAAAGCCGUGGAGAUdTdT |
| AD-59622.1 | A-120528.1 | GUGGCUGGAUGAAUUGGAGdTdT | A-120529.1 | CUCCAAUUCAUCCAGCCACdTdT |
| AD-59623.1 | A-120450.1 | CAAGUUAGUAUCAGCCAAUdTdT | A-120451.1 | AUUGGCUGAUACUAACUUGdTdT |
| AD-59624.1 | A-120466.1 | GUGAUGACAUCACCAUGGUdTdT | A-120467.1 | ACCAUGGUGAUGUCAUCACdTdT |
| AD-59625.1 | A-120482.1 | UUCCAAGAAUGACAAUGAUdTdT | A-120483.1 | AUCAUUGUCAUUCUUGGAAdTdT |
| AD-59626.1 | A-120498.1 | UGAUGGAGGUAUUUAAGUUdTdT | A-120499.1 | AACUUAAAUACCUCCAUCAdTdT |
| AD-59627.1 | A-120514.1 | GUAUUCCAAUGUGAUAGGAdTdT | A-120515.1 | UCCUAUCACAUUGGAAUACdTdT |
| AD-59628.1 | A-120530.1 | CAGCCAAGCCGCGGGACAUdTdT | A-120531.1 | AUGUCCCGCGGCUUGGCUGdTdT |
| AD-59629.1 | A-120452.1 | CAUGCCCCGCUUCCGCAUUdTdT | A-120453.1 | AAUGCGGAAGCGGGGCAUGdTdT |
| AD-59630.1 | A-120468.1 | AUGUGAUAGGAACUGUAACdTdT | A-120469.1 | GUUACAGUUCCUAUCACAUdTdT |
| AD-59631.1 | A-120484.1 | ACAAAUCCCUUACCUUCAAdTdT | A-120485.1 | UUGAAGGUAAGGGAUUUGUdTdT |
| AD-59632.1 | A-120500.1 | AGGUUUAUCUUUUGUCCUUdTdT | A-120501.1 | AAGGACAAAAGAUAAACCUdTdT |
| AD-59633.1 | A-120516.1 | AGAUCCCGGAGGCCACCAAdTdT | A-120517.1 | UUGGUGGCCUCCGGGAUCUdTdT |
| AD-59634.1 | A-120532.1 | ACAUUUUCCUGUCACCCCUdTdT | A-120533.1 | AGGGGUGACAGGAAAAUGUdTdT |
| AD-59635.1 | A-120548.1 | GGCCUUUCCUGGUUUUUAUdTdT | A-120549.1 | AUAAAAACCAGGAAAGGCCdTdT |
| AD-59636.1 | A-120564.1 | UUGUGUUAAGUAAAAUGUUdTdT | A-120565.1 | AACAUUUUACUUAACACAAdTdT |
| AD-59637.1 | A-120534.1 | CAAGGAAAAUGCAGAGCAAdTdT | A-120535.1 | UUGCUCUGCAUUUUCCUUGdTdT |
| AD-59638.1 | A-120550.1 | CUGAGAAAACAUCUGAUCAdTdT | A-120551.1 | UGAUCAGAUGUUUUCUCAGdTdT |
| AD-59639.1 | A-120566.1 | UUACUUCAAGGGCCUGUGGdTdT | A-120567.1 | CCACAGGCCCUUGAAGUAAdTdT |
| AD-59640.1 | A-120536.1 | ACCCCAACAGGGUGACUUUdTdT | A-120537.1 | AAAGUCACCCUGUUGGGGUdTdT |
| AD-59641.1 | A-120552.1 | CCAGGUAUUGUUGCAGAAGdTdT | A-120553.1 | CUUCUGCAACAAUACCUGGdTdT |
| AD-59642.1 | A-120568.1 | GCCUGUGGAAGUCAAAGUUdTdT | A-120569.1 | AACUUUGACUUCCACAGGCdTdT |
| AD-59643.1 | A-120538.1 | UGGAACCUCUGCGAGAUUUdTdT | A-120539.1 | AAAUCUCGCAGAGGUUCCAdTdT |
| AD-59644.1 | A-120554.1 | AGCCCUGAGAACACAAGGAdTdT | A-120555.1 | UCCUUGUGUUCUCAGGGCUdTdT |
| AD-59645.1 | A-120570.1 | CUCUAUGUCUCAGAUGCAUdTdT | A-120571.1 | AUGCAUCUGAGACAUAGAGdTdT |
| AD-59646.1 | A-120540.1 | AAGACCGAAGGCCGAAUCAdTdT | A-120541.1 | UGAUUCGGCCUUCGGUCUUdTdT |
| AD-59647.1 | A-120556.1 | UAAAAUGUUCUUAUUCUUUdTdT | A-120557.1 | AAAGAAUAAGAACAUUUUAdTdT |
| AD-59648.1 | A-120572.1 | UCUGGAAAAAGGAAGGUUUdTdT | A-120573.1 | AAACCUUCCUUUUUCCAGAdTdT |
| AD-59649.1 | A-120542.1 | UUCAAGGCCAACAGGCCUUdTdT | A-120543.1 | AAGGCCUGUUGGCCUUGAAdTdT |
| AD-59650.1 | A-120558.1 | GAAGUCAAAGUUCAGCCCUdTdT | A-120559.1 | AGGGCUGAACUUUGACUUCdTdT |
| AD-59651.1 | A-120574.1 | CCAUCAAUGAGCUCACUGUdTdT | A-120575.1 | ACAGUGAGCUCAUUGAUGGdTdT |
| AD-59652.1 | A-120544.1 | CUCUGAACACUAUUAUCUUdTdT | A-120545.1 | AAGAUAAUAGUGUUCAGAGdTdT |
| AD-59653.1 | A-120560.1 | UGCUGGUUAACACCAUUUAdTdT | A-120561.1 | UAAAUGGUGUUAACCAGCAdTdT |
| AD-59654.1 | A-120546.1 | AGAGGAAAGAACCAGUUUUdTdT | A-120547.1 | AAAACUGGUUCUUUCCUCUdTdT |
| AD-59655.1 | A-120562.1 | UGCCCAGCCCUGUGGAAGAdTdT | A-120563.1 | UCUUCCACAGGGCUGGGCAdTdT |

### Cell Culture and Transfections

[0502] HepG2 cells (ATCC, Manassas, VA) were grown to near confluence at 37° C. in an atmosphere of 5% CO2 in Eagle's Minimum Essential Medium (ATCC) supplemented with 10% FBS, streptomycin, and glutamine (ATCC) before being released from the plate by trypsinization. Transfection was carried out by adding 14.8 μl of Opti-MEM plus 0.4 μl of Lipofectamine RNAiMax per well (Invitrogen, Carlsbad CA. cat #13778-150) to 5 μl of each of the 164 siRNA duplexes to an individual well in a 96-well plate. The mixture was then incubated at room temperature for 15 minutes. 80 μl of complete growth media without antibiotic containing ˜2.5×10⁴ HepG2 cells were then added to the siRNA mixture. Cells were incubated for 24 hours prior to RNA purification. Experiments were performed at 20 nM and included naïve cells and cells transfected with AD-1955, a luciferase targeting siRNA as negative controls.

Total RNA Isolation Using DYNABEADS mRNA Isolation Kit (Invitrogen, Part #: 610-12)

[0503] Cells were harvested and lysed in 150 μl of Lysis/Binding Buffer then mixed for 5 minute at 700 rpm on a platform shaker (the mixing speed was the same throughout the process). Ten microliters of magnetic beads and 80 μl Lysis/Binding Buffer mixture were added to a round bottom plate and mixed for 1 minute. Magnetic beads were captured using magnetic stand and the supernatant was removed without disturbing the beads. After removing supernatant, the lysed cells were added to the remaining beads and mixed for 5 minutes. After removing supernatant, magnetic beads were washed 2 times with 150 μl Wash Buffer A and mixed for 1 minute. Beads were capture again and supernatant removed. Beads were then washed with 150 μl Wash Buffer B, captured and supernatant was removed. Beads were next washed with 150 μl Elution Buffer, captured and supernatant removed. Beads were allowed to dry for 2 minutes. After drying, 50 μl of Elution Buffer was added and mixed for 5 minutes at 70° C. Beads were captured on magnet for 5 minutes. Forty μ1 of supernatant, containing the isolated RNA was removed and added to another 96 well plate.

cDNA Synthesis Using ABI High Capacity cDNA Reverse Transcription Kit (Applied Biosystems, Foster City, CA, Cat #4368813)

[0504] A master mix of 2 μl 10×Buffer, 0.8 μl 25×dNTPs, 2 μl Random primers, 1 μl Reverse Transcriptase, 1 μl RNase inhibitor and 3.4 μl of H₂O per reaction were added into 10 μl total RNA. cDNA was generated using a Bio-Rad C-1000 or S-1000 thermal cycler (Hercules, CA) through the following steps: 25° C. 10 min, 37° C. 120 min, 85° C. 5 sec, 4° C. hold.

### Real Time PCR

[0505] Two μl of cDNA were added to a master mix containing 0.5 μl human GAPDH TaqMan Probe (Applied Biosystems Cat #4326317E), 0.5 μl human SERPINC1 TaqMan probe (Applied Biosystems cat #Hs00892758_m1) and 5 μl Lightcycler 480 probe master mix (Roche Cat #04887301001) per well in a 384-well plate (Roche cat #04887301001). Real time PCR was done in an LC480 Real Time PCR machine (Roche).

[0506] To calculate relative fold change, real time data were analyzed using the ΔΔCt method and normalized to assays performed with cells transfected with 20 nM AD-1955.

[0507] Table 22 shows the results of a single dose screen in HepG2 of the indicated iRNAs.

TABLE 22²
20 nM single dose screen of the indicated iRNAs

| Duplex ID | 20 nM Average | Standard Deviation |
|---|---|---|
| AD1955 | 100.4 | 9.1 |
| AD-59267.1 | 9.3 | 2.7 |
| AD-59268.1 | 72.2 | 20.3 |
| AD-59269.1 | 6.9 | 0.4 |
| AD-59270.1 | 18.3 | 5.2 |
| AD-59271.1 | 27.9 | 7.6 |
| AD-59272.1 | 13.0 | 1.1 |
| AD-59273.1 | 79.4 | 10.9 |
| AD-59274.1 | 5.9 | 1.1 |
| AD-59275.1 | 16.1 | 5.5 |
| AD-59276.1 | 6.1 | 2.2 |
| AD-59277.1 | 4.4 | 0.9 |
| AD-59278.1 | 9.3 | 0.4 |
| AD-59279.1 | 12.7 | 4.7 |
| AD-59280.1 | 4.5 | 1.7 |
| AD-59281.1 | 15.7 | 5.6 |
| AD-59282.1 | 25.9 | 6.9 |
| AD-59283.1 | 27.0 | 18.9 |
| AD-59284.1 | 8.6 | 3.7 |
| AD-59285.1 | 11.2 | 3.7 |
| AD-59286.1 | 15.2 | 5.0 |
| AD-59287.1 | 6.9 | 1.9 |
| AD-59288.1 | 74.5 | 16.5 |
| AD-59289.1 | 3.3 | 1.3 |
| AD-59290.1 | 13.8 | 2.5 |
| AD-59291.1 | 9.4 | 2.8 |
| AD-59292.1 | 9.5 | 3.5 |
| AD-59293.1 | 2.5 | 1.1 |
| AD-59294.1 | 4.8 | 1.8 |
| AD-59295.1 | 11.8 | 7.2 |
| AD-59296.1 | 32.4 | 4.9 |
| AD-59297.1 | 78.5 | 105.0 |
| AD-59298.1 | 76.3 | 10.7 |
| AD-59299.1 | 4.4 | 0.8 |
| AD-59300.1 | 32.2 | 10.8 |
| AD-59301.1 | 48.5 | 15.2 |
| AD-59302.1 | 7.2 | 3.0 |
| AD-59303.1 | 17.0 | 2.3 |
| AD-59304.1 | 87.1 | 16.4 |
| AD-59305.1 | 4.4 | 0.9 |
| AD-59306.1 | 35.7 | 10.6 |
| AD-59307.1 | 6.3 | 0.4 |
| AD-59308.1 | 65.1 | 9.1 |
| AD-59309.1 | 7.5 | 2.0 |
| AD-59310.1 | 27.1 | 9.5 |
| AD-59311.1 | 8.1 | 1.4 |
| AD-59312.1 | 84.5 | 8.5 |
| AD-59313.1 | 17.8 | 0.2 |
| AD-59314.1 | 21.1 | 0.4 |
| AD-59315.1 | 85.5 | 29.8 |
| AD-59316.1 | 13.0 | 1.6 |
| AD-59317.1 | 64.0 | 10.7 |
| AD-59318.1 | 7.9 | 2.2 |
| AD-59319.1 | 31.8 | 4.7 |
| AD-59320.1 | 5.7 | 2.1 |
| AD-59321.1 | 3.4 | 0.0 |
| AD-59322.1 | 9.6 | 1.3 |
| AD-59323.1 | 100.1 | 4.8 |
| AD-59324.1 | 40.2 | 2.9 |
| AD-59325.1 | 5.8 | 0.7 |
| AD-59326.1 | 20.4 | 10.9 |
| AD-59327.1 | 5.0 | 2.0 |
| AD-59328.1 | 8.0 | 2.8 |
| AD-59329.1 | 54.1 | 5.9 |
| AD-59330.1 | 21.6 | 12.3 |
| AD-59331.1 | 4.3 | 2.4 |
| AD-59332.1 | 12.9 | 3.8 |
| AD-59333.1 | 26.1 | 1.0 |
| AD-59334.1 | 41.9 | 4.7 |
| AD-59335.1 | 12.5 | 1.7 |
| AD-59336.1 | 13.5 | 1.7 |
| AD-59337.1 | 78.6 | 3.6 |
| AD-59338.1 | 17.9 | 12.3 |
| AD-59339.1 | 5.8 | 4.1 |
| AD-59340.1 | 92.3 | 10.0 |
| AD-59341.1 | 8.0 | 1.8 |
| AD-59342.1 | 11.1 | 1.9 |
| AD-59343.1 | 43.6 | 4.2 |
| AD-59344.1 | 6.0 | 2.3 |
| AD-59345.1 | 23.6 | 3.6 |
| AD-59346.1 | 41.0 | 3.2 |
| AD-59347.1 | 12.2 | 1.0 |
| AD-59348.1 | 30.0 | 5.1 |
| AD-59349.1 | 14.4 | 0.9 |
| AD-59350.1 | 9.1 | 1.0 |
| AD-59351.1 | 10.7 | 1.6 |
| AD-59352.1 | 1.9 | 0.4 |
| AD-59353.1 | 4.6 | 0.8 |
| AD-59354.1 | 30.1 | 0.1 |
| AD-59355.1 | 12.2 | 2.2 |
| AD-59356.1 | 63.6 | 11.5 |
| AD-59357.1 | 112.1 | 20.6 |
| AD-59358.1 | 23.2 | 3.0 |
| AD-59359.1 | 7.5 | 0.8 |
| AD-59360.1 | 19.2 | 0.5 |
| AD-59587.1 | 8.4 | 2.7 |
| AD-59588.1 | 24.8 | 5.7 |
| AD-59589.1 | 4.4 | 1.7 |
| AD-59590.1 | 13.6 | 1.3 |
| AD-59591.1 | 3.1 | 0.5 |
| AD-59592.1 | 12.1 | 2.7 |
| AD-59593.1 | 7.6 | 3.5 |
| AD-59594.1 | 7.5 | 1.6 |
| AD-59595.1 | 20.1 | 2.9 |
| AD-59596.1 | 7.3 | 1.3 |
| AD-59597.1 | 61.3 | 6.8 |
| AD-59598.1 | 24.4 | 1.6 |
| AD-59599.1 | 4.3 | 0.4 |
| AD-59600.1 | 30.1 | 2.8 |
| AD-59601.1 | 11.4 | 0.8 |
| AD-59602.1 | 6.0 | 0.0 |
| AD-59603.1 | 19.4 | 2.2 |
| AD-59604.1 | 5.8 | 0.6 |
| AD-59605.1 | 6.5 | 0.3 |
| AD-59606.1 | 9.9 | 0.6 |
| AD-59607.1 | 28.0 | 2.8 |
| AD-59608.1 | 66.1 | 8.0 |
| AD-59609.1 | 84.2 | 9.0 |
| AD-59610.1 | 8.0 | 1.7 |
| AD-59611.1 | 6.6 | 1.5 |
| AD-59612.1 | 31.5 | 2.7 |
| AD-59613.1 | 27.6 | 1.7 |
| AD-59614.1 | 20.3 | 0.5 |
| AD-59615.1 | 12.8 | 1.4 |
| AD-59616.1 | 6.8 | 0.3 |
| AD-59617.1 | 13.1 | 0.9 |
| AD-59618.1 | 5.4 | 0.2 |
| AD-59619.1 | 59.1 | 5.4 |
| AD-59620.1 | 6.3 | 1.7 |
| AD-59621.1 | 18.4 | 1.8 |
| AD-59622.1 | 9.6 | 1.2 |
| AD-59623.1 | 8.7 | 2.1 |
| AD-59624.1 | 13.6 | 0.7 |
| AD-59625.1 | 12.0 | 1.5 |
| AD-59626.1 | 14.6 | 1.8 |
| AD-59627.1 | 7.7 | 6.7 |
| AD-59628.1 | 7.6 | 0.3 |
| AD-59629.1 | 55.7 | 8.2 |
| AD-59630.1 | 20.2 | 5.9 |
| AD-59631.1 | 12.3 | 0.1 |
| AD-59632.1 | 3.1 | 0.3 |
| AD-59633.1 | 20.4 | 2.1 |
| AD-59634.1 | 3.7 | 0.0 |
| AD-59635.1 | 16.1 | 1.3 |
| AD-59636.1 | 13.0 | 1.0 |
| AD-59637.1 | 14.4 | 4.8 |
| AD-59638.1 | 7.7 | 1.0 |
| AD-59639.1 | 70.4 | 5.3 |
| AD-59640.1 | 2.5 | 0.1 |
| AD-59641.1 | 18.1 | 2.1 |
| AD-59642.1 | 5.9 | 1.0 |
| AD-59643.1 | 70.7 | 17.8 |
| AD-59644.1 | 17.9 | 4.7 |
| AD-59645.1 | 2.5 | 0.1 |
| AD-59646.1 | 19.9 | 0.1 |
| AD-59647.1 | 74.8 | 12.0 |
| AD-59648.1 | 6.8 | 0.0 |
| AD-59649.1 | 95.2 | 6.2 |
| AD-59650.1 | 71.1 | 1.0 |
| AD-59651.1 | 5.0 | 0.8 |
| AD-59652.1 | 5.5 | 1.2 |
| AD-59653.1 | 15.3 | 1.0 |
| AD-59654.1 | 67.4 | 0.9 |
| AD-59655.1 | 10.8 | 1.0 |
| Naïve | 94.9 | 14.2 |

²Modified.

The application's sequence listing, which the Patent Office published only in electronic form, follows.

SEQUENCE LISTING (1630 sequences)

SEQ ID NO: 1 - DNA, 1599 bp, Homo sapiens
  source 1..1599: mol_type = genomic DNA
tctgccccaccctgtcctctggaacctctgcgagatttagaggaaagaaccagttttcaggcggattgcctcagatcacactatctccacttgcccagccctgtggaagattagcggccatgtattccaatgtgataggaactgtaacctctggaaaaaggaaggtttatcttttgtccttgctgctcattggcttctgggactgcgtgacctgtcacgggagccctgtggacatctgcacagccaagccgcgggacattcccatgaatcccatgtgcatttaccgctccccggagaagaaggcaactgaggatgagggctcagaacagaagatcccggaggccaccaaccggcgtgtctgggaactgtccaaggccaattcccgctttgctaccactttctatcagcacctggcagattccaagaatgacaatgataacattttcctgtcacccctgagtatctccacggcttttgctatgaccaagctgggtgcctgtaatgacaccctccagcaactgatggaggtatttaagtttgacaccatatctgagaaaacatctgatcagatccacttcttctttgccaaactgaactgccgactctatcgaaaagccaacaaatcctccaagttagtatcagccaatcgcctttttggagacaaatcccttaccttcaatgagacctaccaggacatcagtgagttggtatatggagccaagctccagcccctggacttcaaggaaaatgcagagcaatccagagcggccatcaacaaatgggtgtccaataagaccgaaggccgaatcaccgatgtcattccctcggaagccatcaatgagctcactgttctggtgctggttaacaccatttacttcaagggcctgtggaagtcaaagttcagccctgagaacacaaggaaggaactgttctacaaggctgatggagagtcgtgttcagcatctatgatgtaccaggaaggcaagttccgttatcggcgcgtggctgaaggcacccaggtgcttgagttgcccttcaaaggtgatgacatcaccatggtcctcatcttgcccaagcctgagaagagcctggccaaggtagagaaggaactcaccccagaggtgctgcaagagtggctggatgaattggaggagatgatgctggtggtccacatgccccgcttccgcattgaggacggcttcagtttgaaggagcagctgcaagacatgggccttgtcgatctgttcagccctgaaaagtccaaactcccaggtattgttgcagaaggccgagatgacctctatgtctcagatgcattccataaggcatttcttgaggtaaatgaagaaggcagtgaagcagctgcaagtaccgctgttgtgattgctggccgttcgctaaaccccaacagggtgactttcaaggccaacaggcctttcctggtttttataagagaagttcctctgaacactattatcttcatgggcagagtagccaacccttgtgttaagtaaaatgttcttattctttgcacctcttcctatttttggtttgtgaacagaagtaaaaataaatacaaactacttccatctcacatta

SEQ ID NO: 2 - DNA, 1545 bp, Macaca mulatta
  source 1..1545: mol_type = genomic DNA
ggcacgaggaccatctccacttgcccagccctgtggaagattagcgaccatgtattccaatgtgataggaaccgtagcctctggaaaaaggaaggtttatcttctgtccttgctgctcattggcctctgggactgtatgacctgtcacgggagccctgtggacatctgcacagccaagccgcgggacattcccatgaatcccatgtgcatttaccgctccccggagaagaaggcaactgaggatgagggctcagaacagaagatccccgaggccaccaaccggcgcgtctgggaactgtccaaggccaattcccgctttgctaccactttctatcagcacctggcagattccaagaacgacaaggataacattttcctgtcacccctgagtgtctccacggcttttgctatgaccaagctgggtgcctgtaatgacaccctcaagcaactgatggaggtatttaagtttgacaccatatctgagaaaacatctgatcagatccacttcttctttgccaaactgaactgccgactctatcgaaaagccaacaaatcctccaagttagtatcagccaatcgcctttttggagacaaatcccttaccttcaatgagacctaccaggacatcagtgagttggtatacggagccaagctccagcccctggacttcaaggaaaatgcagagcaatccagagcggccatcaacaaatgggtgtccaataagaccgaaggccgaatcaccgatgtcattcccccggaagccatcaacgagctcactgttctggtgctggttaacaccatttacttcaagggcctgtggaagtcaaagtttagccctgagaacacaaggatggaaccgttctacaaggctgatggagagtcgtgttcagcgtctatgatgtaccaggaaggcaagttctgttatcggcgcgtggctgaaggcacccaggtgcttgagttgcccttcaagggtgatgacatcaccatggtgctcatcctgcccaagcctgagaagagcctgaccaaggtggagcaggaactcaccccagaggtgctgcaggagtggctggatgagttggaggagatgatgctggtggttcacatgccccgcttccgcattgaggacggcttcagtttgaaggagcagctgcaagacatgggccttgtcgatctgttcagccctgaaaagtccaaactcccaggtattgttgcagaaggccgggatgacctctatgtctccgatgcattccataaggcatttcttgaggtaaatgaagaaggcagtgaagcagctgcaagtaccgccattgggattgctggccgttcgctaaaccccaacagggtgaccttcaaggccaacaggcctttcctggtttttataagagaagttcctctgaacactattatcttcatgggcagagtagccaacccttgtgtgagctaaactgttcttattctttgtacctcttcctattttggtttgtgaatagaagtaaaaataaatacaactactcccatcttacattaaaaaaaaaaaaaaaaaaa

SEQ ID NO: 3 - DNA, 2171 bp, Mus musculus
  source 1..2171: mol_type = genomic DNA
ataggtaattttagaaatagatctgatttgtatctgagacattttagtgaagtggtgagatataagacataatcagaagacatatctacctgaagactttaaggggagagctccctcccccacctggcctctggacctctcagatttaggggaaagaaccagttttcggagtgatcgtctcagtcagcaccatctctgtaggagcatcggccatgtattcccctggggcaggaagtggggctgctggtgagaggaagctttgtctcctctctctgctcctcatcggtgccttgggctgtgctatctgtcacggaaaccctgtggacgacatctgcatagcgaagccccgagacatccccgtgaatcccttgtgcatttaccgctcccctgggaagaaggccaccgaggaggatggctcagagcagaaggttccagaagccaccaaccggcgggtctgggaactgtccaaggccaattcgcgatttgccactaacttctaccagcacctggcagactccaagaatgacaacgacaacattttcctgtcacccttgagcatctccactgcttttgctatgaccaagctgggtgcctgtaacgacactctcaagcagctgatggaggtttttaaatttgataccatctccgagaagacatccgaccagatccacttcttctttgccaaactgaactgccgactctatcgaaaagccaacaagtcctctgacttggtatcagccaaccgcctttttggagacaaatccctcaccttcaacgagagctatcaagatgttagtgaggttgtctatggagccaagctccagcccctggacttcaaggagaatccggagcaatccagagtgaccatcaacaactgggtagctaataagactgaaggccgcatcaaagatgtcatcccacagggcgccattaacgagctcactgccctggttctggttaacaccatttacttcaagggcctgtggaagtcaaagttcagccctgagaacacaaggaaggaaccgttctataaggtcgatgggcagtcatgcccagtgcctatgatgtaccaggaaggcaaattcaaataccggcgcgtggcagagggcacccaggtgctagagctgcccttcaagggggatgacatcaccatggtgctcatcctgcccaagcctgagaagagcctggccaaggtggagcaggagctcaccccagagctgctgcaggagtggctggatgagctgtcagagactatgcttgtggtccacatgccccgcttccgcaccgaggatggcttcagtctgaaggagcagctgcaagacatgggcctcattgatctcttcagccctgaaaagtcccaactcccagggatcgttgctggaggcagggacgacctctatgtctccgacgcattccacaaagcatttcttgaggtaaatgaggaaggcagtgaagcagcagcgagtacttctgtcgtgattactggccggtcactgaaccccaatagggtgaccttcaaggccaacaggcccttcctggttcttataagggaagttgcactgaacactattatattcatggggagagtggctaatccttgtgtgaactaaaatattcttaatctttgcaccttttcctactttggtgtttgtgaatagaagtaaaaataaatacgactgccacctcacgagaatggacttttccacttgaagacgagagactggagtacagatgctacaccacttttgggcaagtgaagggggagcagccagccacggtggcacaaacctatatcctggtgcttttgaaggtagaagcagggcggtcaggagttaaggccagttgaggctgggctgcagagtgaaagaccatgtctcaagatggtctttctcctccccaaagtagaaaagaaaaccataaaaacaagaggtaaatatattactatttcatcttagaggatagcaggcatcttgaaagggtagagggaccttaaattctcattattgcccccatactacaaactaaaaaacaaacccgaatcaatctcccataaagacagagattcaaataagagtattaaacgttttatttctcaaaccactcacatgcataatgttcttatacacagtgtcaaaataaagagaaatgcatttttatacaaaaaaaaaaaa

SEQ ID NO: 4 - DNA, 1561 bp, Rattus norvegicus
  source 1..1561: mol_type = genomic DNA
cggagggattgctcagcactgtctccacggcttctctgcagaagcgtccaccatgtattccccgggaataggaagtgcggttgctggagagaggaagctttgtctcctctctctgctactcattggtgccttgggctgtgctgtctgtcatggaaaccctgtggacgacatctgcatagcgaagccccgagacatccccgtgaaccccatgtgcatttaccgctcccctgcgaagaaggccacggaggaggatgtcctagagcagaaggttccggaagccaccaaccggcgggtctgggaactgtccaaggccaattctcgatttgccactaacttctatcagcacctggcagactccaagaacgacaacgacaacattttcctgtcacccttgagcatctccacggcgtttgctatgaccaagctgggtgcttgtaataacaccctcaagcagctgatggaggtttttaaatttgataccatctccgagaagacatccgaccagatccacttcttctttgccaaactgaactgccgactctatcgaaaagccaacaagtcctctaacttggtgtcagccaaccgcctttttggagacaaatcccttaccttcaatgagagctatcaagacgttagtgagattgtctatggagccaagcttcagcccctggacttcaaggagaatccggagcaatccagagtgaccatcaacaactgggtagctaataagactgaaggccgcatcaaagacgtcatcccccaaggagccattgatgagctcactgccctggtgctggttaacaccatttacttcaagggcctgtggaagtcaaagttcagccctgagaacacaaggaaggaaccattccacaaagttgatgggcagtcatgcctggtgcccatgatgtaccaggaaggcaaattcaaatacaggcgtgtgggagagggtacccaggtgctagagatgcccttcaagggggacgacatcaccatggtgctcatcctgcccaagcctgagaagagcctggctaaggtggagcaggaactcaccccggagctgctgcaggagtggctggatgagctgtcggaggtcatgcttgtggtccacgtgccccgcttccgcatcgaggacagcttcagtctgaaggagcagctgcaagacatgggccttgttgatctcttcagccctgagaagtcccaactcccagggatcattgctgaaggcagggacgacctctttgtctccgatgcattccacaaagcgtttcttgaggtaaatgaggaaggcagtgaagcagcagcgagtacttctgtcgtgattactggccggtcactgaaccccagtagggtgaccttcaaggccaacaggcccttcctggttcttataagggaagtcgcactgaacactattatattcatggggagagtgtctaatccttgtgtgaactaaaatattcttaatctttgcaccttttcctatctcggtgtttgttaatggaagtaaaaataaatatgactgccacctcaaaaaaaaaaaaaaaaaaaaaaaaaaaaaaaaaaa

SEQ ID NO: 5 - DNA, 1599 bp, Homo sapiens
  source 1..1599: mol_type = genomic DNA
taatgtgagatggaagtagtttgtatttatttttacttctgttcacaaaccaaaaataggaagaggtgcaaagaataagaacattttacttaacacaagggttggctactctgcccatgaagataatagtgttcagaggaacttctcttataaaaaccaggaaaggcctgttggccttgaaagtcaccctgttggggtttagcgaacggccagcaatcacaacagcggtacttgcagctgcttcactgccttcttcatttacctcaagaaatgccttatggaatgcatctgagacatagaggtcatctcggccttctgcaacaatacctgggagtttggacttttcagggctgaacagatcgacaaggcccatgtcttgcagctgctccttcaaactgaagccgtcctcaatgcggaagcggggcatgtggaccaccagcatcatctcctccaattcatccagccactcttgcagcacctctggggtgagttccttctctaccttggccaggctcttctcaggcttgggcaagatgaggaccatggtgatgtcatcacctttgaagggcaactcaagcacctgggtgccttcagccacgcgccgataacggaacttgccttcctggtacatcatagatgctgaacacgactctccatcagccttgtagaacagttccttccttgtgttctcagggctgaactttgacttccacaggcccttgaagtaaatggtgttaaccagcaccagaacagtgagctcattgatggcttccgagggaatgacatcggtgattcggccttcggtcttattggacacccatttgttgatggccgctctggattgctctgcattttccttgaagtccaggggctggagcttggctccatataccaactcactgatgtcctggtaggtctcattgaaggtaagggatttgtctccaaaaaggcgattggctgatactaacttggaggatttgttggcttttcgatagagtcggcagttcagtttggcaaagaagaagtggatctgatcagatgttttctcagatatggtgtcaaacttaaatacctccatcagttgctggagggtgtcattacaggcacccagcttggtcatagcaaaagccgtggagatactcaggggtgacaggaaaatgttatcattgtcattcttggaatctgccaggtgctgatagaaagtggtagcaaagcgggaattggccttggacagttcccagacacgccggttggtggcctccgggatcttctgttctgagccctcatcctcagttgccttcttctccggggagcggtaaatgcacatgggattcatgggaatgtcccgcggcttggctgtgcagatgtccacagggctcccgtgacaggtcacgcagtcccagaagccaatgagcagcaaggacaaaagataaaccttcctttttccagaggttacagttcctatcacattggaatacatggccgctaatcttccacagggctgggcaagtggagatagtgtgatctgaggcaatccgcctgaaaactggttctttcctctaaatctcgcagaggttccagaggacagggtggggcaga

SEQ ID NO: 6 - DNA, 1545 bp, Macaca mulatta
  source 1..1545: mol_type = genomic DNA
tttttttttttttttttttaatgtaagatgggagtagttgtatttatttttacttctattcacaaaccaaaataggaagaggtacaaagaataagaacagtttagctcacacaagggttggctactctgcccatgaagataatagtgttcagaggaacttctcttataaaaaccaggaaaggcctgttggccttgaaggtcaccctgttggggtttagcgaacggccagcaatcccaatggcggtacttgcagctgcttcactgccttcttcatttacctcaagaaatgccttatggaatgcatcggagacatagaggtcatcccggccttctgcaacaatacctgggagtttggacttttcagggctgaacagatcgacaaggcccatgtcttgcagctgctccttcaaactgaagccgtcctcaatgcggaagcggggcatgtgaaccaccagcatcatctcctccaactcatccagccactcctgcagcacctctggggtgagttcctgctccaccttggtcaggctcttctcaggcttgggcaggatgagcaccatggtgatgtcatcacccttgaagggcaactcaagcacctgggtgccttcagccacgcgccgataacagaacttgccttcctggtacatcatagacgctgaacacgactctccatcagccttgtagaacggttccatccttgtgttctcagggctaaactttgacttccacaggcccttgaagtaaatggtgttaaccagcaccagaacagtgagctcgttgatggcttccgggggaatgacatcggtgattcggccttcggtcttattggacacccatttgttgatggccgctctggattgctctgcattttccttgaagtccaggggctggagcttggctccgtataccaactcactgatgtcctggtaggtctcattgaaggtaagggatttgtctccaaaaaggcgattggctgatactaacttggaggatttgttggcttttcgatagagtcggcagttcagtttggcaaagaagaagtggatctgatcagatgttttctcagatatggtgtcaaacttaaatacctccatcagttgcttgagggtgtcattacaggcacccagcttggtcatagcaaaagccgtggagacactcaggggtgacaggaaaatgttatccttgtcgttcttggaatctgccaggtgctgatagaaagtggtagcaaagcgggaattggccttggacagttcccagacgcgccggttggtggcctcggggatcttctgttctgagccctcatcctcagttgccttcttctccggggagcggtaaatgcacatgggattcatgggaatgtcccgcggcttggctgtgcagatgtccacagggctcccgtgacaggtcatacagtcccagaggccaatgagcagcaaggacagaagataaaccttcctttttccagaggctacggttcctatcacattggaatacatggtcgctaatcttccacagggctgggcaagtggagatggtcctcgtgcc

SEQ ID NO: 7 - DNA, 2171 bp, Mus musculus
  source 1..2171: mol_type = genomic DNA
ttttttttttttgtataaaaatgcatttctctttattttgacactgtgtataagaacattatgcatgtgagtggtttgagaaataaaacgtttaatactcttatttgaatctctgtctttatgggagattgattcgggtttgttttttagtttgtagtatgggggcaataatgagaatttaaggtccctctaccctttcaagatgcctgctatcctctaagatgaaatagtaatatatttacctcttgtttttatggttttcttttctactttggggaggagaaagaccatcttgagacatggtctttcactctgcagcccagcctcaactggccttaactcctgaccgccctgcttctaccttcaaaagcaccaggatataggtttgtgccaccgtggctggctgctcccccttcacttgcccaaaagtggtgtagcatctgtactccagtctctcgtcttcaagtggaaaagtccattctcgtgaggtggcagtcgtatttatttttacttctattcacaaacaccaaagtaggaaaaggtgcaaagattaagaatattttagttcacacaaggattagccactctccccatgaatataatagtgttcagtgcaacttcccttataagaaccaggaagggcctgttggccttgaaggtcaccctattggggttcagtgaccggccagtaatcacgacagaagtactcgctgctgcttcactgccttcctcatttacctcaagaaatgctttgtggaatgcgtcggagacatagaggtcgtccctgcctccagcaacgatccctgggagttgggacttttcagggctgaagagatcaatgaggcccatgtcttgcagctgctccttcagactgaagccatcctcggtgcggaagcggggcatgtggaccacaagcatagtctctgacagctcatccagccactcctgcagcagctctggggtgagctcctgctccaccttggccaggctcttctcaggcttgggcaggatgagcaccatggtgatgtcatcccccttgaagggcagctctagcacctgggtgccctctgccacgcgccggtatttgaatttgccttcctggtacatcataggcactgggcatgactgcccatcgaccttatagaacggttccttccttgtgttctcagggctgaactttgacttccacaggcccttgaagtaaatggtgttaaccagaaccagggcagtgagctcgttaatggcgccctgtgggatgacatctttgatgcggccttcagtcttattagctacccagttgttgatggtcactctggattgctccggattctccttgaagtccaggggctggagcttggctccatagacaacctcactaacatcttgatagctctcgttgaaggtgagggatttgtctccaaaaaggcggttggctgataccaagtcagaggacttgttggcttttcgatagagtcggcagttcagtttggcaaagaagaagtggatctggtcggatgtcttctcggagatggtatcaaatttaaaaacctccatcagctgcttgagagtgtcgttacaggcacccagcttggtcatagcaaaagcagtggagatgctcaagggtgacaggaaaatgttgtcgttgtcattcttggagtctgccaggtgctggtagaagttagtggcaaatcgcgaattggccttggacagttcccagacccgccggttggtggcttctggaaccttctgctctgagccatcctcctcggtggccttcttcccaggggagcggtaaatgcacaagggattcacggggatgtctcggggcttcgctatgcagatgtcgtccacagggtttccgtgacagatagcacagcccaaggcaccgatgaggagcagagagaggagacaaagcttcctctcaccagcagccccacttcctgccccaggggaatacatggccgatgctcctacagagatggtgctgactgagacgatcactccgaaaactggttctttcccctaaatctgagaggtccagaggccaggtgggggagggagctctccccttaaagtcttcaggtagatatgtcttctgattatgtcttatatctcaccacttcactaaaatgtctcagatacaaatcagatctatttctaaaattacctat

SEQ ID NO: 8 - DNA, 1561 bp, Rattus norvegicus
  source 1..1561: mol_type = genomic DNA
tttttttttttttttttttttttttttttttttttgaggtggcagtcatatttatttttacttccattaacaaacaccgagataggaaaaggtgcaaagattaagaatattttagttcacacaaggattagacactctccccatgaatataatagtgttcagtgcgacttcccttataagaaccaggaagggcctgttggccttgaaggtcaccctactggggttcagtgaccggccagtaatcacgacagaagtactcgctgctgcttcactgccttcctcatttacctcaagaaacgctttgtggaatgcatcggagacaaagaggtcgtccctgccttcagcaatgatccctgggagttgggacttctcagggctgaagagatcaacaaggcccatgtcttgcagctgctccttcagactgaagctgtcctcgatgcggaagcggggcacgtggaccacaagcatgacctccgacagctcatccagccactcctgcagcagctccggggtgagttcctgctccaccttagccaggctcttctcaggcttgggcaggatgagcaccatggtgatgtcgtcccccttgaagggcatctctagcacctgggtaccctctcccacacgcctgtatttgaatttgccttcctggtacatcatgggcaccaggcatgactgcccatcaactttgtggaatggttccttccttgtgttctcagggctgaactttgacttccacaggcccttgaagtaaatggtgttaaccagcaccagggcagtgagctcatcaatggctccttgggggatgacgtctttgatgcggccttcagtcttattagctacccagttgttgatggtcactctggattgctccggattctccttgaagtccaggggctgaagcttggctccatagacaatctcactaacgtcttgatagctctcattgaaggtaagggatttgtctccaaaaaggcggttggctgacaccaagttagaggacttgttggcttttcgatagagtcggcagttcagtttggcaaagaagaagtggatctggtcggatgtcttctcggagatggtatcaaatttaaaaacctccatcagctgcttgagggtgttattacaagcacccagcttggtcatagcaaacgccgtggagatgctcaagggtgacaggaaaatgttgtcgttgtcgttcttggagtctgccaggtgctgatagaagttagtggcaaatcgagaattggccttggacagttcccagacccgccggttggtggcttccggaaccttctgctctaggacatcctcctccgtggccttcttcgcaggggagcggtaaatgcacatggggttcacggggatgtctcggggcttcgctatgcagatgtcgtccacagggtttccatgacagacagcacagcccaaggcaccaatgagtagcagagagaggagacaaagcttcctctctccagcaaccgcacttcctattcccggggaatacatggtggacgcttctgcagagaagccgtggagacagtgctgagcaatccctccg

SEQ ID NO: 9 - protein, 16 aa, unidentified
  REGION 1..16: note = Description of Unknown: Exemplary hydrophobic membrane translocation peptide
AAVALLPAVLLALLAP

SEQ ID NO: 10 - protein, 11 aa, unidentified
  REGION 1..11: note = Description of Unknown: RFGF analogue peptide
AALLPVLLAAP

SEQ ID NO: 11 - protein, 13 aa, Human immunodeficiency virus
GRKKRRQRRRPPQ

SEQ ID NO: 12 - protein, 16 aa, Drosophila sp.
RQIKIWFQNRRMKWKK

SEQ ID NO: 13 - RNA, 21 nt, synthetic construct
  modified_base 20..21: mod_base = OTHER; note = thymine
  misc_feature 1..21: note = Description of Artificial Sequence: Synthetic oligonucleotide
  misc_feature 1..21: note = Description of Combined DNA/RNA Molecule: Synthetic oligonucleotide
  source 1..21: mol_type = other RNA
cttacgctgagtacttcgatt

SEQ ID NO: 14 - RNA, 21 nt, synthetic construct
  modified_base 20..21: mod_base = OTHER; note = thymine
  misc_feature 1..21: note = Description of Artificial Sequence: Synthetic oligonucleotide
  misc_feature 1..21: note = Description of Combined DNA/RNA Molecule: Synthetic oligonucleotide
  source 1..21: mol_type = other RNA
tcgaagtactcagcgtaagtt

SEQ ID NO: 15 - RNA, 19 nt, synthetic construct
  misc_feature 1..19: note = Description of Artificial Sequence: Synthetic oligonucleotide
  source 1..19: mol_type = other RNA
ccctgtggacatctgcaca

SEQ ID NO: 16 - RNA, 19 nt, synthetic construct
  misc_feature 1..19: note = Description of Artificial Sequence: Synthetic oligonucleotide
  source 1..19: mol_type = other RNA
ctaccactttctatcagca

SEQ ID NO: 17 - RNA, 19 nt, synthetic construct
  misc_feature 1..19: note = Description of Artificial Sequence: Synthetic oligonucleotide
  source 1..19: mol_type = other RNA
ctatcgaaaagccaacaaa

SEQ ID NO: 18 - RNA, 19 nt, synthetic construct
  misc_feature 1..19: note = Description of Artificial Sequence: Synthetic oligonucleotide
  source 1..19: mol_type = other RNA
ggacttcaaggaaaatgca

SEQ ID NO: 19 - RNA, 19 nt, synthetic construct
  misc_feature 1..19: note = Description of Artificial Sequence: Synthetic oligonucleotide
  source 1..19: mol_type = other RNA
gttaacaccatttacttca

SEQ ID NO: 20 - RNA, 19 nt, synthetic construct
  misc_feature 1..19: note = Description of Artificial Sequence: Synthetic oligonucleotide
  source 1..19: mol_type = other RNA
cctggtttttataagagaa

SEQ ID NO: 21 - RNA, 19 nt, synthetic construct
  misc_feature 1..19: note = Description of Artificial Sequence: Synthetic oligonucleotide
  source 1..19: mol_type = other RNA
gacattcccatgaatccca

SEQ ID NO: 22 - RNA, 19 nt, synthetic construct
  misc_feature 1..19: note = Description of Artificial Sequence: Synthetic oligonucleotide
  source 1..19: mol_type = other RNA
cacctggcagattccaaga

SEQ ID NO: 23 - RNA, 19 nt, synthetic construct
  misc_feature 1..19: note = Description of Artificial Sequence: Synthetic oligonucleotide
  source 1..19: mol_type = other RNA
cgaaaagccaacaaatcct

SEQ ID NO: 24 - RNA, 19 nt, synthetic construct
  misc_feature 1..19: note = Description of Artificial Sequence: Synthetic oligonucleotide
  source 1..19: mol_type = other RNA
gaaaatgcagagcaatcca

SEQ ID NO: 25 - RNA, 19 nt, synthetic construct
  misc_feature 1..19: note = Description of Artificial Sequence: Synthetic oligonucleotide
  source 1..19: mol_type = other RNA
ggcctgtggaagtcaaagt

SEQ ID NO: 26 - RNA, 19 nt, synthetic construct
  misc_feature 1..19: note = Description of Artificial Sequence: Synthetic oligonucleotide
  source 1..19: mol_type = other RNA
gaagttcctctgaacacta

SEQ ID NO: 27 - RNA, 19 nt, synthetic construct
  misc_feature 1..19: note = Description of Artificial Sequence: Synthetic oligonucleotide
  source 1..19: mol_type = other RNA
ccatgaatcccatgtgcat

SEQ ID NO: 28 - RNA, 19 nt, synthetic construct
  misc_feature 1..19: note = Description of Artificial Sequence: Synthetic oligonucleotide
  source 1..19: mol_type = other RNA
caactgatggaggtattta

SEQ ID NO: 29 - RNA, 19 nt, synthetic construct
  misc_feature 1..19: note = Description of Artificial Sequence: Synthetic oligonucleotide
  source 1..19: mol_type = other RNA
ccaagttagtatcagccaa

SEQ ID NO: 30 - RNA, 19 nt, synthetic construct
  misc_feature 1..19: note = Description of Artificial Sequence: Synthetic oligonucleotide
  source 1..19: mol_type = other RNA
cggccatcaacaaatgggt

SEQ ID NO: 31 - RNA, 19 nt, synthetic construct
  misc_feature 1..19: note = Description of Artificial Sequence: Synthetic oligonucleotide
  source 1..19: mol_type = other RNA
gaggacggcttcagtttga

SEQ ID NO: 32 - RNA, 19 nt, synthetic construct
  misc_feature 1..19: note = Description of Artificial Sequence: Synthetic oligonucleotide
  source 1..19: mol_type = other RNA
cctctgaacactattatct

SEQ ID NO: 33 - RNA, 19 nt, synthetic construct
  misc_feature 1..19: note = Description of Artificial Sequence: Synthetic oligonucleotide
  source 1..19: mol_type = other RNA
catgaatcccatgtgcatt

SEQ ID NO: 34 - RNA, 19 nt, synthetic construct
  misc_feature 1..19: note = Description of Artificial Sequence: Synthetic oligonucleotide
  source 1..19: mol_type = other RNA
gatggaggtatttaagttt

SEQ ID NO: 35 - RNA, 19 nt, synthetic construct
  misc_feature 1..19: note = Description of Artificial Sequence: Synthetic oligonucleotide
  source 1..19: mol_type = other RNA
gtatcagccaatcgccttt

SEQ ID NO: 36 - RNA, 19 nt, synthetic construct
  misc_feature 1..19: note = Description of Artificial Sequence: Synthetic oligonucleotide
  source 1..19: mol_type = other RNA
gggtgtccaataagaccga

SEQ ID NO: 37 - RNA, 19 nt, synthetic construct
  misc_feature 1..19: note = Description of Artificial Sequence: Synthetic oligonucleotide
  source 1..19: mol_type = other RNA
cagccctgaaaagtccaaa

SEQ ID NO: 38 - RNA, 19 nt, synthetic construct
  misc_feature 1..19: note = Description of Artificial Sequence: Synthetic oligonucleotide
  source 1..19: mol_type = other RNA
cccatgtgcatttaccgct

SEQ ID NO: 39 - RNA, 19 nt, synthetic construct
  misc_feature 1..19: note = Description of Artificial Sequence: Synthetic oligonucleotide
  source 1..19: mol_type = other RNA
gtatttaagtttgacacca

SEQ ID NO: 40 - RNA, 19 nt, synthetic construct
  misc_feature 1..19: note = Description of Artificial Sequence: Synthetic oligonucleotide
  source 1..19: mol_type = other RNA
gacaaatcccttaccttca

SEQ ID NO: 41 - RNA, 19 nt, synthetic construct
  misc_feature 1..19: note = Description of Artificial Sequence: Synthetic oligonucleotide
  source 1..19: mol_type = other RNA
ctgttctggtgctggttaa

SEQ ID NO: 42 - RNA, 19 nt, synthetic construct
  misc_feature 1..19: note = Description of Artificial Sequence: Synthetic oligonucleotide
  source 1..19: mol_type = other RNA
ccaaactcccaggtattgt

SEQ ID NO: 43 - RNA, 19 nt, synthetic construct
  misc_feature 1..19: note = Description of Artificial Sequence: Synthetic oligonucleotide
  source 1..19: mol_type = other RNA
cccgctttgctaccacttt

SEQ ID NO: 44 - RNA, 19 nt, synthetic construct
  misc_feature 1..19: note = Description of Artificial Sequence: Synthetic oligonucleotide
  source 1..19: mol_type = other RNA
cttaccttcaatgagacct

SEQ ID NO: 45 - RNA, 19 nt, synthetic construct
  misc_feature 1..19: note = Description of Artificial Sequence: Synthetic oligonucleotide
  source 1..19: mol_type = other RNA
ctggtgctggttaacacca

SEQ ID NO: 46 - RNA, 19 nt, synthetic construct
  misc_feature 1..19: note = Description of Artificial Sequence: Synthetic oligonucleotide
  source 1..19: mol_type = other RNA
caaactcccaggtattgtt

SEQ ID NO: 47 - RNA, 19 nt, synthetic construct
  misc_feature 1..19: note = Description of Artificial Sequence: Synthetic oligonucleotide
  source 1..19: mol_type = other RNA
gctttgctaccactttcta

SEQ ID NO: 48 - RNA, 19 nt, synthetic construct
  misc_feature 1..19: note = Description of Artificial Sequence: Synthetic oligonucleotide
  source 1..19: mol_type = other RNA
cctaccaggacatcagtga

SEQ ID NO: 49 - RNA, 19 nt, synthetic construct
  misc_feature 1..19: note = Description of Artificial Sequence: Synthetic oligonucleotide
  source 1..19: mol_type = other RNA
ggtgctggttaacaccatt

SEQ ID NO: 50 - RNA, 19 nt, synthetic construct
  misc_feature 1..19: note = Description of Artificial Sequence: Synthetic oligonucleotide
  source 1..19: mol_type = other RNA
gccgttcgctaaaccccaa

SEQ ID NO: 51 - RNA, 19 nt, synthetic construct
  misc_feature 1..19: note = Description of Artificial Sequence: Synthetic oligonucleotide
  source 1..19: mol_type = other RNA
ggacatcagtgagttggta

SEQ ID NO: 52 - RNA, 19 nt, synthetic construct
  misc_feature 1..19: note = Description of Artificial Sequence: Synthetic oligonucleotide
  source 1..19: mol_type = other RNA
gtgctggttaacaccattt

SEQ ID NO: 53 - RNA, 19 nt, synthetic construct
  misc_feature 1..19: note = Description of Artificial Sequence: Synthetic oligonucleotide
  source 1..19: mol_type = other RNA
gcctttcctggtttttata

SEQ ID NO: 54 - RNA, 19 nt, synthetic construct
  misc_feature 1..19: note = Description of Artificial Sequence: Synthetic oligonucleotide
  source 1..19: mol_type = other RNA
cttttgctatgaccaagct

SEQ ID NO: 55 - RNA, 19 nt, synthetic construct
  misc_feature 1..19: note = Description of Artificial Sequence: Synthetic oligonucleotide
  source 1..19: mol_type = other RNA
tgtaccaggaaggcaagtt

SEQ ID NO: 56 - RNA, 19 nt, synthetic construct
  misc_feature 1..19: note = Description of Artificial Sequence: Synthetic oligonucleotide
  source 1..19: mol_type = other RNA
actattatcttcatgggca

SEQ ID NO: 57 - RNA, 19 nt, synthetic construct
  misc_feature 1..19: note = Description of Artificial Sequence: Synthetic oligonucleotide
  source 1..19: mol_type = other RNA
tcatgggcagagtagccaa

SEQ ID NO: 58 - RNA, 19 nt, synthetic construct
  misc_feature 1..19: note = Description of Artificial Sequence: Synthetic oligonucleotide
  source 1..19: mol_type = other RNA
ccatttacttcaagggcct

SEQ ID NO: 59 - RNA, 19 nt, synthetic construct
  misc_feature 1..19: note = Description of Artificial Sequence: Synthetic oligonucleotide
  source 1..19: mol_type = other RNA
tacttcaagggcctgtgga

SEQ ID NO: 60 - RNA, 19 nt, synthetic construct
  misc_feature 1..19: note = Description of Artificial Sequence: Synthetic oligonucleotide
  source 1..19: mol_type = other RNA
acttcaagggcctgtggaa

SEQ ID NO: 61 - RNA, 19 nt, synthetic construct
  misc_feature 1..19: note = Description of Artificial Sequence: Synthetic oligonucleotide
  source 1..19: mol_type = other RNA
cgactctatcgaaaagcca

SEQ ID NO: 62 - RNA, 19 nt, synthetic construct
  misc_feature 1..19: note = Description of Artificial Sequence: Synthetic oligonucleotide
  source 1..19: mol_type = other RNA
aactgccgactctatcgaa

SEQ ID NO: 63 - RNA, 19 nt, synthetic construct
  misc_feature 1..19: note = Description of Artificial Sequence: Synthetic oligonucleotide
  source 1..19: mol_type = other RNA
actgccgactctatcgaaa

SEQ ID NO: 64 - RNA, 19 nt, synthetic construct
  misc_feature 1..19: note = Description of Artificial Sequence: Synthetic oligonucleotide
  source 1..19: mol_type = other RNA
gactctatcgaaaagccaa

SEQ ID NO: 65 - RNA, 19 nt, synthetic construct
  misc_feature 1..19: note = Description of Artificial Sequence: Synthetic oligonucleotide
  source 1..19: mol_type = other RNA
tcttctttgccaaactgaa

SEQ ID NO: 66 - RNA, 19 nt, synthetic construct
  misc_feature 1..19: note = Description of Artificial Sequence: Synthetic oligonucleotide
  source 1..19: mol_type = other RNA
tgccaaactgaactgccga

SEQ ID NO: 67 - RNA, 19 nt, synthetic construct
  misc_feature 1..19: note = Description of Artificial Sequence: Synthetic oligonucleotide
  source 1..19: mol_type = other RNA
ccaaactgaactgccgact

SEQ ID NO: 68 - RNA, 19 nt, synthetic construct
  misc_feature 1..19: note = Description of Artificial Sequence: Synthetic oligonucleotide
  source 1..19: mol_type = other RNA
actgaactgccgactctat

SEQ ID NO: 69 - RNA, 19 nt, synthetic construct
  misc_feature 1..19: note = Description of Artificial Sequence: Synthetic oligonucleotide
  source 1..19: mol_type = other RNA
gaactgccgactctatcga

SEQ ID NO: 70 - RNA, 19 nt, synthetic construct
  misc_feature 1..19: note = Description of Artificial Sequence: Synthetic oligonucleotide
  source 1..19: mol_type = other RNA
ctgccgactctatcgaaaa

SEQ ID NO: 71 - RNA, 19 nt, synthetic construct
  misc_feature 1..19: note = Description of Artificial Sequence: Synthetic oligonucleotide
  source 1..19: mol_type = other RNA
ctggttaacaccatttact

SEQ ID NO: 72 - RNA, 19 nt, synthetic construct
  misc_feature 1..19: note = Description of Artificial Sequence: Synthetic oligonucleotide
  source 1..19: mol_type = other RNA
tgtgcagatgtccacaggg

SEQ ID NO: 73 - RNA, 19 nt, synthetic construct
  misc_feature 1..19: note = Description of Artificial Sequence: Synthetic oligonucleotide
  source 1..19: mol_type = other RNA
tgctgatagaaagtggtag

SEQ ID NO: 74 - RNA, 19 nt, synthetic construct
  misc_feature 1..19: note = Description of Artificial Sequence: Synthetic oligonucleotide
  source 1..19: mol_type = other RNA
tttgttggcttttcgatag

SEQ ID NO: 75 - RNA, 19 nt, synthetic construct
  misc_feature 1..19: note = Description of Artificial Sequence: Synthetic oligonucleotide
  source 1..19: mol_type = other RNA
tgcattttccttgaagtcc

SEQ ID NO: 76 - RNA, 19 nt, synthetic construct
  misc_feature 1..19: note = Description of Artificial Sequence: Synthetic oligonucleotide
  source 1..19: mol_type = other RNA
tgaagtaaatggtgttaac

SEQ ID NO: 77 - RNA, 19 nt, synthetic construct
  misc_feature 1..19: note = Description of Artificial Sequence: Synthetic oligonucleotide
  source 1..19: mol_type = other RNA
ttctcttataaaaaccagg

SEQ ID NO: 78 - RNA, 19 nt, synthetic construct
  misc_feature 1..19: note = Description of Artificial Sequence: Synthetic oligonucleotide
  source 1..19: mol_type = other RNA
tgggattcatgggaatgtc

SEQ ID NO: 79 - RNA, 19 nt, synthetic construct
  misc_feature 1..19: note = Description of Artificial Sequence: Synthetic oligonucleotide
  source 1..19: mol_type = other RNA
tcttggaatctgccaggtg

SEQ ID NO: 80 - RNA, 19 nt, synthetic construct
  misc_feature 1..19: note = Description of Artificial Sequence: Synthetic oligonucleotide
  source 1..19: mol_type = other RNA
aggatttgttggcttttcg

SEQ ID NO: 81 - RNA, 19 nt, synthetic construct
  misc_feature 1..19: note = Description of Artificial Sequence: Synthetic oligonucleotide
  source 1..19: mol_type = other RNA
tggattgctctgcattttc

SEQ ID NO: 82 - RNA, 19 nt, synthetic construct
  misc_feature 1..19: note = Description of Artificial Sequence: Synthetic oligonucleotide
  source 1..19: mol_type = other RNA
actttgacttccacaggcc

SEQ ID NO: 83 - RNA, 19 nt, synthetic construct
  misc_feature 1..19: note = Description of Artificial Sequence: Synthetic oligonucleotide
  source 1..19: mol_type = other RNA
tagtgttcagaggaacttc

SEQ ID NO: 84 - RNA, 19 nt, synthetic construct
  misc_feature 1..19: note = Description of Artificial Sequence: Synthetic oligonucleotide
  source 1..19: mol_type = other RNA
atgcacatgggattcatgg

SEQ ID NO: 85 - RNA, 19 nt, synthetic construct
  misc_feature 1..19: note = Description of Artificial Sequence: Synthetic oligonucleotide
  source 1..19: mol_type = other RNA
taaatacctccatcagttg

SEQ ID NO: 86 - RNA, 19 nt, synthetic construct
  misc_feature 1..19: note = Description of Artificial Sequence: Synthetic oligonucleotide
  source 1..19: mol_type = other RNA
ttggctgatactaacttgg

SEQ ID NO: 87 - RNA, 19 nt, synthetic construct
  misc_feature 1..19: note = Description of Artificial Sequence: Synthetic oligonucleotide
  source 1..19: mol_type = other RNA
acccatttgttgatggccg

SEQ ID NO: 88 - RNA, 19 nt, synthetic construct
  misc_feature 1..19: note = Description of Artificial Sequence: Synthetic oligonucleotide
  source 1..19: mol_type = other RNA
tcaaactgaagccgtcctc

SEQ ID NO: 89 - RNA, 19 nt, synthetic construct
  misc_feature 1..19: note = Description of Artificial Sequence: Synthetic oligonucleotide
  source 1..19: mol_type = other RNA
agataatagtgttcagagg

SEQ ID NO: 90 - RNA, 19 nt, synthetic construct
  misc_feature 1..19: note = Description of Artificial Sequence: Synthetic oligonucleotide
  source 1..19: mol_type = other RNA
aatgcacatgggattcatg

SEQ ID NO: 91 - RNA, 19 nt, synthetic construct
  misc_feature 1..19: note = Description of Artificial Sequence: Synthetic oligonucleotide
  source 1..19: mol_type = other RNA
aaacttaaatacctccatc

SEQ ID NO: 92 - RNA, 19 nt, synthetic construct
  misc_feature 1..19: note = Description of Artificial Sequence: Synthetic oligonucleotide
  source 1..19: mol_type = other RNA
aaaggcgattggctgatac

SEQ ID NO: 93 - RNA, 19 nt, synthetic construct
  misc_feature 1..19: note = Description of Artificial Sequence: Synthetic oligonucleotide
  source 1..19: mol_type = other RNA
tcggtcttattggacaccc

SEQ ID NO: 94 - RNA, 19 nt, synthetic construct
  misc_feature 1..19: note = Description of Artificial Sequence: Synthetic oligonucleotide
  source 1..19: mol_type = other RNA
tttggacttttcagggctg

SEQ ID NO: 95 - RNA, 19 nt, synthetic construct
  misc_feature 1..19: note = Description of Artificial Sequence: Synthetic oligonucleotide
  source 1..19: mol_type = other RNA
agcggtaaatgcacatggg

SEQ ID NO: 96 - RNA, 19 nt, synthetic construct
  misc_feature 1..19: note = Description of Artificial Sequence: Synthetic oligonucleotide
  source 1..19: mol_type = other RNA
tggtgtcaaacttaaatac

SEQ ID NO: 97 - RNA, 19 nt, synthetic construct
  misc_feature 1..19: note = Description of Artificial Sequence: Synthetic oligonucleotide
  source 1..19: mol_type = other RNA
tgaaggtaagggatttgtc

SEQ ID NO: 98 - RNA, 19 nt, synthetic construct
  misc_feature 1..19: note = Description of Artificial Sequence: Synthetic oligonucleotide
  source 1..19: mol_type = other RNA
ttaaccagcaccagaacag

SEQ ID NO: 99 - RNA, 19 nt, synthetic construct
  misc_feature 1..19: note = Description of Artificial Sequence: Synthetic oligonucleotide
  source 1..19: mol_type = other RNA
acaatacctgggagtttgg

SEQ ID NO: 100 - RNA, 19 nt, synthetic construct
  misc_feature 1..19: note = Description of Artificial Sequence: Synthetic oligonucleotide
  source 1..19: mol_type = other RNA
aaagtggtagcaaagcggg

SEQ ID NO: 101 - RNA, 19 nt, synthetic construct
  misc_feature 1..19: note = Description of Artificial Sequence: Synthetic oligonucleotide
  source 1..19: mol_type = other RNA
aggtctcattgaaggtaag

SEQ ID NO: 102 - RNA, 19 nt, synthetic construct
  misc_feature 1..19: note = Description of Artificial Sequence: Synthetic oligonucleotide
  source 1..19: mol_type = other RNA
tggtgttaaccagcaccag

SEQ ID NO: 103 - RNA, 19 nt, synthetic construct
  misc_feature 1..19: note = Description of Artificial Sequence: Synthetic oligonucleotide
  source 1..19: mol_type = other RNA
aacaatacctgggagtttg

SEQ ID NO: 104 - RNA, 19 nt, synthetic construct
  misc_feature 1..19: note = Description of Artificial Sequence: Synthetic oligonucleotide
  source 1..19: mol_type = other RNA
tagaaagtggtagcaaagc

SEQ ID NO: 105 - RNA, 19 nt, synthetic construct
  misc_feature 1..19: note = Description of Artificial Sequence: Synthetic oligonucleotide
  source 1..19: mol_type = other RNA
tcactgatgtcctggtagg

SEQ ID NO: 106 - RNA, 19 nt, synthetic construct
  misc_feature 1..19: note = Description of Artificial Sequence: Synthetic oligonucleotide
  source 1..19: mol_type = other RNA
aatggtgttaaccagcacc

SEQ ID NO: 107 - RNA, 19 nt, synthetic construct
  misc_feature 1..19: note = Description of Artificial Sequence: Synthetic oligonucleotide
  source 1..19: mol_type = other RNA
ttggggtttagcgaacggc

SEQ ID NO: 108 - RNA, 19 nt, synthetic construct
  misc_feature 1..19: note = Description of Artificial Sequence: Synthetic oligonucleotide
  source 1..19: mol_type = other RNA
taccaactcactgatgtcc

SEQ ID NO: 109 - RNA, 19 nt, synthetic construct
  misc_feature 1..19: note = Description of Artificial Sequence: Synthetic oligonucleotide
  source 1..19: mol_type = other RNA
aaatggtgttaaccagcac

SEQ ID NO: 110 - RNA, 19 nt, synthetic construct
  misc_feature 1..19: note = Description of Artificial Sequence: Synthetic oligonucleotide
  source 1..19: mol_type = other RNA
tataaaaaccaggaaaggc

SEQ ID NO: 111 - RNA, 19 nt, synthetic construct
  misc_feature 1..19: note = Description of Artificial Sequence: Synthetic oligonucleotide
  source 1..19: mol_type = other RNA
agcttggtcatagcaaaag

SEQ ID NO: 112 - RNA, 19 nt, synthetic construct
  misc_feature 1..19: note = Description of Artificial Sequence: Synthetic oligonucleotide
  source 1..19: mol_type = other RNA
aacttgccttcctggtaca

SEQ ID NO: 113 - RNA, 19 nt, synthetic construct
  misc_feature 1..19: note = Description of Artificial Sequence: Synthetic oligonucleotide
  source 1..19: mol_type = other RNA
tgcccatgaagataatagt

SEQ ID NO: 114 - RNA, 19 nt, synthetic construct
  misc_feature 1..19: note = Description of Artificial Sequence: Synthetic oligonucleotide
  source 1..19: mol_type = other RNA
ttggctactctgcccatga

SEQ ID NO: 115 - RNA, 19 nt, synthetic construct
  misc_feature 1..19: note = Description of Artificial Sequence: Synthetic oligonucleotide
  source 1..19: mol_type = other RNA
aggcccttgaagtaaatgg

SEQ ID NO: 116 - RNA, 19 nt, synthetic construct
  misc_feature 1..19: note = Description of Artificial Sequence: Synthetic oligonucleotide
  source 1..19: mol_type = other RNA
tccacaggcccttgaagta

SEQ ID NO: 117 - RNA, 19 nt, synthetic construct
  misc_feature 1..19: note = Description of Artificial Sequence: Synthetic oligonucleotide
  source 1..19: mol_type = other RNA
ttccacaggcccttgaagt

SEQ ID NO: 118 - RNA, 19 nt, synthetic construct
  misc_feature 1..19: note = Description of Artificial Sequence: Synthetic oligonucleotide
  source 1..19: mol_type = other RNA
tggcttttcgatagagtcg

SEQ ID NO: 119 - RNA, 19 nt, synthetic construct
  misc_feature 1..19: note = Description of Artificial Sequence: Synthetic oligonucleotide
  source 1..19: mol_type = other RNA
ttcgatagagtcggcagtt

SEQ ID NO: 120 - RNA, 19 nt, synthetic construct
  misc_feature 1..19: note = Description of Artificial Sequence: Synthetic oligonucleotide
  source 1..19: mol_type = other RNA
tttcgatagagtcggcagt

SEQ ID NO: 121 - RNA, 19 nt, synthetic construct
  misc_feature 1..19: note = Description of Artificial Sequence: Synthetic oligonucleotide
  source 1..19: mol_type = other RNA
ttggcttttcgatagagtc

SEQ ID NO: 122 - RNA, 19 nt, synthetic construct
  misc_feature 1..19: note = Description of Artificial Sequence: Synthetic oligonucleotide
  source 1..19: mol_type = other RNA
ttcagtttggcaaagaaga

SEQ ID NO: 123 - RNA, 19 nt, synthetic construct
  misc_feature 1..19: note = Description of Artificial Sequence: Synthetic oligonucleotide
  source 1..19: mol_type = other RNA
tcggcagttcagtttggca

SEQ ID NO: 124 - RNA, 19 nt, synthetic construct
  misc_feature 1..19: note = Description of Artificial Sequence: Synthetic oligonucleotide
  source 1..19: mol_type = other RNA
agtcggcagttcagtttgg

SEQ ID NO: 125 - RNA, 19 nt, synthetic construct
  misc_feature 1..19: note = Description of Artificial Sequence: Synthetic oligonucleotide
  source 1..19: mol_type = other RNA
atagagtcggcagttcagt

SEQ ID NO: 126 - RNA, 19 nt, synthetic construct
  misc_feature 1..19: note = Description of Artificial Sequence: Synthetic oligonucleotide
  source 1..19: mol_type = other RNA
tcgatagagtcggcagttc

SEQ ID NO: 127 - RNA, 19 nt, synthetic construct
  misc_feature 1..19: note = Description of Artificial Sequence: Synthetic oligonucleotide
  source 1..19: mol_type = other RNA
ttttcgatagagtcggcag

SEQ ID NO: 128 - RNA, 19 nt, synthetic construct
  misc_feature 1..19: note = Description of Artificial Sequence: Synthetic oligonucleotide
  source 1..19: mol_type = other RNA
agtaaatggtgttaaccag

SEQ ID NO: 129 - RNA, 21 nt, synthetic construct
  modified_base 20..21: mod_base = OTHER; note = thymine
  misc_feature 1..21: note = Description of Artificial Sequence: Synthetic oligonucleotide
  misc_feature 1..21: note = Description of Combined DNA/RNA Molecule: Synthetic oligonucleotide
  source 1..21: mol_type = other RNA
ccctgtggacatctgcacatt

SEQ ID NO: 130 - RNA, 21 nt, synthetic construct
  modified_base 20..21: mod_base = OTHER; note = thymine
  misc_feature 1..21: note = Description of Artificial Sequence: Synthetic oligonucleotide
  misc_feature 1..21: note = Description of Combined DNA/RNA Molecule: Synthetic oligonucleotide
  source 1..21: mol_type = other RNA
ctaccactttctatcagcatt

SEQ ID NO: 131 - RNA, 21 nt, synthetic construct
  modified_base 20..21: mod_base = OTHER; note = thymine
  misc_feature 1..21: note = Description of Artificial Sequence: Synthetic oligonucleotide
  misc_feature 1..21: note = Description of Combined DNA/RNA Molecule: Synthetic oligonucleotide
  source 1..21: mol_type = other RNA
ctatcgaaaagccaacaaatt

SEQ ID NO: 132 - RNA, 21 nt, synthetic construct
  modified_base 20..21: mod_base = OTHER; note = thymine
  misc_feature 1..21: note = Description of Artificial Sequence: Synthetic oligonucleotide
  misc_feature 1..21: note = Description of Combined DNA/RNA Molecule: Synthetic oligonucleotide
  source 1..21: mol_type = other RNA
ggacttcaaggaaaatgcatt

SEQ ID NO: 133 - RNA, 21 nt, synthetic construct
  modified_base 20..21: mod_base = OTHER; note = thymine
  misc_feature 1..21: note = Description of Artificial Sequence: Synthetic oligonucleotide
  misc_feature 1..21: note = Description of Combined DNA/RNA Molecule: Synthetic oligonucleotide
  source 1..21: mol_type = other RNA
gttaacaccatttacttcatt

SEQ ID NO: 134 - RNA, 21 nt, synthetic construct
  modified_base 20..21: mod_base = OTHER; note = thymine
  misc_feature 1..21: note = Description of Artificial Sequence: Synthetic oligonucleotide
  misc_feature 1..21: note = Description of Combined DNA/RNA Molecule: Synthetic oligonucleotide
  source 1..21: mol_type = other RNA
cctggtttttataagagaatt

SEQ ID NO: 135 - RNA, 21 nt, synthetic construct
  modified_base 20..21: mod_base = OTHER; note = thymine
  misc_feature 1..21: note = Description of Artificial Sequence: Synthetic oligonucleotide
  misc_feature 1..21: note = Description of Combined DNA/RNA Molecule: Synthetic oligonucleotide
  source 1..21: mol_type = other RNA
gacattcccatgaatcccatt

SEQ ID NO: 136 - RNA, 21 nt, synthetic construct
  modified_base 20..21: mod_base = OTHER; note = thymine
  misc_feature 1..21: note = Description of Artificial Sequence: Synthetic oligonucleotide
  misc_feature 1..21: note = Description of Combined DNA/RNA Molecule: Synthetic oligonucleotide
  source 1..21: mol_type = other RNA
cacctggcagattccaagatt

SEQ ID NO: 137 - RNA, 21 nt, synthetic construct
  modified_base 20..21: mod_base = OTHER; note = thymine
  misc_feature 1..21: note = Description of Artificial Sequence: Synthetic oligonucleotide
  misc_feature 1..21: note = Description of Combined DNA/RNA Molecule: Synthetic oligonucleotide
  source 1..21: mol_type = other RNA
cgaaaagccaacaaatccttt

SEQ ID NO: 138 - RNA, 21 nt, synthetic construct
  modified_base 20..21: mod_base = OTHER; note = thymine
  misc_feature 1..21: note = Description of Artificial Sequence: Synthetic oligonucleotide
  misc_feature 1..21: note = Description of Combined DNA/RNA Molecule: Synthetic oligonucleotide
  source 1..21: mol_type = other RNA
gaaaatgcagagcaatccatt

SEQ ID NO: 139 - RNA, 21 nt, synthetic construct
  modified_base 20..21: mod_base = OTHER; note = thymine
  misc_feature 1..21: note = Description of Artificial Sequence: Synthetic oligonucleotide
  misc_feature 1..21: note = Description of Combined DNA/RNA Molecule: Synthetic oligonucleotide
  source 1..21: mol_type = other RNA
ggcctgtggaagtcaaagttt

SEQ ID NO: 140 - RNA, 21 nt, synthetic construct
  modified_base 20..21: mod_base = OTHER; note = thymine
  misc_feature 1..21: note = Description of Artificial Sequence: Synthetic oligonucleotide
  misc_feature 1..21: note = Description of Combined DNA/RNA Molecule: Synthetic oligonucleotide
  source 1..21: mol_type = other RNA
gaagttcctctgaacactatt

SEQ ID NO: 141 - RNA, 21 nt, synthetic construct
  modified_base 20..21: mod_base = OTHER; note = thymine
  misc_feature 1..21: note = Description of Artificial Sequence: Synthetic oligonucleotide
  misc_feature 1..21: note = Description of Combined DNA/RNA Molecule: Synthetic oligonucleotide
  source 1..21: mol_type = other RNA
ccatgaatcccatgtgcattt

SEQ ID NO: 142 - RNA, 21 nt, synthetic construct
  modified_base 20..21: mod_base = OTHER; note = thymine
  misc_feature 1..21: note = Description of Artificial Sequence: Synthetic oligonucleotide
  misc_feature 1..21: note = Description of Combined DNA/RNA Molecule: Synthetic oligonucleotide
  source 1..21: mol_type = other RNA
caactgatggaggtatttatt

SEQ ID NO: 143 - RNA, 21 nt, synthetic construct
  modified_base 20..21: mod_base = OTHER; note = thymine
  misc_feature 1..21: note = Description of Artificial Sequence: Synthetic oligonucleotide
  misc_feature 1..21: note = Description of Combined DNA/RNA Molecule: Synthetic oligonucleotide
  source 1..21: mol_type = other RNA
ccaagttagtatcagccaatt

SEQ ID NO: 144 - RNA, 21 nt, synthetic construct
  modified_base 20..21: mod_base = OTHER; note = thymine
  misc_feature 1..21: note = Description of Artificial Sequence: Synthetic oligonucleotide
  misc_feature 1..21: note = Description of Combined DNA/RNA Molecule: Synthetic oligonucleotide
  source 1..21: mol_type = other RNA
cggccatcaacaaatgggttt

SEQ ID NO: 145 - RNA, 21 nt, synthetic construct
  modified_base 20..21: mod_base = OTHER; note = thymine
  misc_feature 1..21: note = Description of Artificial Sequence: Synthetic oligonucleotide
  misc_feature 1..21: note = Description of Combined DNA/RNA Molecule: Synthetic oligonucleotide
  source 1..21: mol_type = other RNA
gaggacggcttcagtttgatt

SEQ ID NO: 146 - RNA, 21 nt, synthetic construct
  modified_base 20..21: mod_base = OTHER; note = thymine
  misc_feature 1..21: note = Description of Artificial Sequence: Synthetic oligonucleotide
  misc_feature 1..21: note = Description of Combined DNA/RNA Molecule: Synthetic oligonucleotide
  source 1..21: mol_type = other RNA
cctctgaacactattatcttt

SEQ ID NO: 147 - RNA, 21 nt, synthetic construct
  modified_base 20..21: mod_base = OTHER; note = thymine
  misc_feature 1..21: note = Description of Artificial Sequence: Synthetic oligonucleotide
  misc_feature 1..21: note = Description of Combined DNA/RNA Molecule: Synthetic oligonucleotide
  source 1..21: mol_type = other RNA
catgaatcccatgtgcatttt

SEQ ID NO: 148 - RNA, 21 nt, synthetic construct
  modified_base 20..21: mod_base = OTHER; note = thymine
  misc_feature 1..21: note = Description of Artificial Sequence: Synthetic oligonucleotide
  misc_feature 1..21: note = Description of Combined DNA/RNA Molecule: Synthetic oligonucleotide
  source 1..21: mol_type = other RNA
gatggaggtatttaagttttt

SEQ ID NO: 149 - RNA, 21 nt, synthetic construct
  modified_base 20..21: mod_base = OTHER; note = thymine
  misc_feature 1..21: note = Description of Artificial Sequence: Synthetic oligonucleotide
  misc_feature 1..21: note = Description of Combined DNA/RNA Molecule: Synthetic oligonucleotide
  source 1..21: mol_type = other RNA
gtatcagccaatcgccttttt

SEQ ID NO: 150 - RNA, 21 nt, synthetic construct
  modified_base 20..21: mod_base = OTHER; note = thymine
  misc_feature 1..21: note = Description of Artificial Sequence: Synthetic oligonucleotide
  misc_feature 1..21: note = Description of Combined DNA/RNA Molecule: Synthetic oligonucleotide
  source 1..21: mol_type = other RNA
gggtgtccaataagaccgatt

SEQ ID NO: 151 - RNA, 21 nt, synthetic construct
  modified_base 20..21: mod_base = OTHER; note = thymine
  misc_feature 1..21: note = Description of Artificial Sequence: Synthetic oligonucleotide
  misc_feature 1..21: note = Description of Combined DNA/RNA Molecule: Synthetic oligonucleotide
  source 1..21: mol_type = other RNA
cagccctgaaaagtccaaatt

SEQ ID NO: 152 - RNA, 21 nt, synthetic construct
  modified_base 20..21: mod_base = OTHER; note = thymine
  misc_feature 1..21: note = Description of Artificial Sequence: Synthetic oligonucleotide
  misc_feature 1..21: note = Description of Combined DNA/RNA Molecule: Synthetic oligonucleotide
  source 1..21: mol_type = other RNA
cccatgtgcatttaccgcttt

SEQ ID NO: 153 - RNA, 21 nt, synthetic construct
  modified_base 20..21: mod_base = OTHER; note = thymine
  misc_feature 1..21: note = Description of Artificial Sequence: Synthetic oligonucleotide
  misc_feature 1..21: note = Description of Combined DNA/RNA Molecule: Synthetic oligonucleotide
  source 1..21: mol_type = other RNA
gtatttaagtttgacaccatt

SEQ ID NO: 154 - RNA, 21 nt, synthetic construct
  modified_base 20..21: mod_base = OTHER; note = thymine
  misc_feature 1..21: note = Description of Artificial Sequence: Synthetic oligonucleotide
  misc_feature 1..21: note = Description of Combined DNA/RNA Molecule: Synthetic oligonucleotide
  source 1..21: mol_type = other RNA
gacaaatcccttaccttcatt

SEQ ID NO: 155 - RNA, 21 nt, synthetic construct
  modified_base 20..21: mod_base = OTHER; note = thymine
  misc_feature 1..21: note = Description of Artificial Sequence: Synthetic oligonucleotide
  misc_feature 1..21: note = Description of Combined DNA/RNA Molecule: Synthetic oligonucleotide
  source 1..21: mol_type = other RNA
ctgttctggtgctggttaatt

SEQ ID NO: 156 - RNA, 21 nt, synthetic construct
  modified_base 20..21: mod_base = OTHER; note = thymine
  misc_feature 1..21: note = Description of Artificial Sequence: Synthetic oligonucleotide
  misc_feature 1..21: note = Description of Combined DNA/RNA Molecule: Synthetic oligonucleotide
  source 1..21: mol_type = other RNA
ccaaactcccaggtattgttt

SEQ ID NO: 157 - RNA, 21 nt, synthetic construct
  modified_base 20..21: mod_base = OTHER; note = thymine
  misc_feature 1..21: note = Description of Artificial Sequence: Synthetic oligonucleotide
  misc_feature 1..21: note = Description of Combined DNA/RNA Molecule: Synthetic oligonucleotide
  source 1..21: mol_type = other RNA
cccgctttgctaccacttttt

SEQ ID NO: 158 - RNA, 21 nt, synthetic construct
  modified_base 20..21: mod_base = OTHER; note = thymine
  misc_feature 1..21: note = Description of Artificial Sequence: Synthetic oligonucleotide
  misc_feature 1..21: note = Description of Combined DNA/RNA Molecule: Synthetic oligonucleotide
  source 1..21: mol_type = other RNA
cttaccttcaatgagaccttt

SEQ ID NO: 159 - RNA, 21 nt, synthetic construct
  modified_base 20..21: mod_base = OTHER; note = thymine
  misc_feature 1..21: note = Description of Artificial Sequence: Synthetic oligonucleotide
  misc_feature 1..21: note = Description of Combined DNA/RNA Molecule: Synthetic oligonucleotide
  source 1..21: mol_type = other RNA
ctggtgctggttaacaccatt

SEQ ID NO: 160 - RNA, 21 nt, synthetic construct
  modified_base 20..21: mod_base = OTHER; note = thymine
  misc_feature 1..21: note = Description of Artificial Sequence: Synthetic oligonucleotide
  misc_feature 1..21: note = Description of Combined DNA/RNA Molecule: Synthetic oligonucleotide
  source 1..21: mol_type = other RNA
caaactcccaggtattgtttt

SEQ ID NO: 161 - RNA, 21 nt, synthetic construct
  modified_base 20..21: mod_base = OTHER; note = thymine
  misc_feature 1..21: note = Description of Artificial Sequence: Synthetic oligonucleotide
  misc_feature 1..21: note = Description of Combined DNA/RNA Molecule: Synthetic oligonucleotide
  source 1..21: mol_type = other RNA
gctttgctaccactttctatt

SEQ ID NO: 162 - RNA, 21 nt, synthetic construct
  modified_base 20..21: mod_base = OTHER; note = thymine
  misc_feature 1..21: note = Description of Artificial Sequence: Synthetic oligonucleotide
  misc_feature 1..21: note = Description of Combined DNA/RNA Molecule: Synthetic oligonucleotide
  source 1..21: mol_type = other RNA
cctaccaggacatcagtgatt

SEQ ID NO: 163 - RNA, 21 nt, synthetic construct
  modified_base 20..21: mod_base = OTHER; note = thymine
  misc_feature 1..21: note = Description of Artificial Sequence: Synthetic oligonucleotide
  misc_feature 1..21: note = Description of Combined DNA/RNA Molecule: Synthetic oligonucleotide
  source 1..21: mol_type = other RNA
ggtgctggttaacaccatttt

SEQ ID NO: 164 - RNA, 21 nt, synthetic construct
  modified_base 20..21: mod_base = OTHER; note = thymine
  misc_feature 1..21: note = Description of Artificial Sequence: Synthetic oligonucleotide
  misc_feature 1..21: note = Description of Combined DNA/RNA Molecule: Synthetic oligonucleotide
  source 1..21: mol_type = other RNA
gccgttcgctaaaccccaatt

SEQ ID NO: 165 - RNA, 21 nt, synthetic construct
  modified_base 20..21: mod_base = OTHER; note = thymine
  misc_feature 1..21: note = Description of Artificial Sequence: Synthetic oligonucleotide
  misc_feature 1..21: note = Description of Combined DNA/RNA Molecule: Synthetic oligonucleotide
  source 1..21: mol_type = other RNA
ggacatcagtgagttggtatt

SEQ ID NO: 166 - RNA, 21 nt, synthetic construct
  modified_base 20..21: mod_base = OTHER; note = thymine
  misc_feature 1..21: note = Description of Artificial Sequence: Synthetic oligonucleotide
  misc_feature 1..21: note = Description of Combined DNA/RNA Molecule: Synthetic oligonucleotide
  source 1..21: mol_type = other RNA
gtgctggttaacaccattttt

SEQ ID NO: 167 - RNA, 21 nt, synthetic construct
  modified_base 20..21: mod_base = OTHER; note = thymine
  misc_feature 1..21: note = Description of Artificial Sequence: Synthetic oligonucleotide
  misc_feature 1..21: note = Description of Combined DNA/RNA Molecule: Synthetic oligonucleotide
  source 1..21: mol_type = other RNA
gcctttcctggtttttatatt

SEQ ID NO: 168 - RNA, 21 nt, synthetic construct
  modified_base 20..21: mod_base = OTHER; note = thymine
  misc_feature 1..21: note = Description of Artificial Sequence: Synthetic oligonucleotide
  misc_feature 1..21: note = Description of Combined DNA/RNA Molecule: Synthetic oligonucleotide
  source 1..21: mol_type = other RNA
cttttgctatgaccaagcttt

SEQ ID NO: 169 - RNA, 21 nt, synthetic construct
  modified_base 20..21: mod_base = OTHER; note = thymine
  misc_feature 1..21: note = Description of Artificial Sequence: Synthetic oligonucleotide
  misc_feature 1..21: note = Description of Combined DNA/RNA Molecule: Synthetic oligonucleotide
  source 1..21: mol_type = other RNA
tgtaccaggaaggcaagtttt

SEQ ID NO: 170 - RNA, 21 nt, synthetic construct
  modified_base 20..21: mod_base = OTHER; note = thymine
  misc_feature 1..21: note = Description of Artificial Sequence: Synthetic oligonucleotide
  misc_feature 1..21: note = Description of Combined DNA/RNA Molecule: Synthetic oligonucleotide
  source 1..21: mol_type = other RNA
actattatcttcatgggcatt

SEQ ID NO: 171 - RNA, 21 nt, synthetic construct
  modified_base 20..21: mod_base = OTHER; note = thymine
  misc_feature 1..21: note = Description of Artificial Sequence: Synthetic oligonucleotide
  misc_feature 1..21: note = Description of Combined DNA/RNA Molecule: Synthetic oligonucleotide
  source 1..21: mol_type = other RNA
tcatgggcagagtagccaatt

SEQ ID NO: 172 - RNA, 21 nt, synthetic construct
  modified_base 20..21: mod_base = OTHER; note = thymine
  misc_feature 1..21: note = Description of Artificial Sequence: Synthetic oligonucleotide
  misc_feature 1..21: note = Description of Combined DNA/RNA Molecule: Synthetic oligonucleotide
  source 1..21: mol_type = other RNA
ccatttacttcaagggccttt

SEQ ID NO: 173 - RNA, 21 nt, synthetic construct
  modified_base 20..21: mod_base = OTHER; note = thymine
  misc_feature 1..21: note = Description of Artificial Sequence: Synthetic oligonucleotide
  misc_feature 1..21: note = Description of Combined DNA/RNA Molecule: Synthetic oligonucleotide
  source 1..21: mol_type = other RNA
tacttcaagggcctgtggatt

SEQ ID NO: 174 - RNA, 21 nt, synthetic construct
  modified_base 20..21: mod_base = OTHER; note = thymine
  misc_feature 1..21: note = Description of Artificial Sequence: Synthetic oligonucleotide
  misc_feature 1..21: note = Description of Combined DNA/RNA Molecule: Synthetic oligonucleotide
  source 1..21: mol_type = other RNA
acttcaagggcctgtggaatt

SEQ ID NO: 175 - RNA, 21 nt, synthetic construct
  modified_base 20..21: mod_base = OTHER; note = thymine
  misc_feature 1..21: note = Description of Artificial Sequence: Synthetic oligonucleotide
  misc_feature 1..21: note = Description of Combined DNA/RNA Molecule: Synthetic oligonucleotide
  source 1..21: mol_type = other RNA
cgactctatcgaaaagccatt

SEQ ID NO: 176 - RNA, 21 nt, synthetic construct
  modified_base 20..21: mod_base = OTHER; note = thymine
  misc_feature 1..21: note = Description of Artificial Sequence: Synthetic oligonucleotide
  misc_feature 1..21: note = Description of Combined DNA/RNA Molecule: Synthetic oligonucleotide
  source 1..21: mol_type = other RNA
aactgccgactctatcgaatt

SEQ ID NO: 177 - RNA, 21 nt, synthetic construct
  modified_base 20..21: mod_base = OTHER; note = thymine
  misc_feature 1..21: note = Description of Artificial Sequence: Synthetic oligonucleotide
  misc_feature 1..21: note = Description of Combined DNA/RNA Molecule: Synthetic oligonucleotide
  source 1..21: mol_type = other RNA
actgccgactctatcgaaatt

SEQ ID NO: 178 - RNA, 21 nt, synthetic construct
  modified_base 20..21: mod_base = OTHER; note = thymine
  misc_feature 1..21: note = Description of Artificial Sequence: Synthetic oligonucleotide
  misc_feature 1..21: note = Description of Combined DNA/RNA Molecule: Synthetic oligonucleotide
  source 1..21: mol_type = other RNA
gactctatcgaaaagccaatt

SEQ ID NO: 179 - RNA, 21 nt, synthetic construct
  modified_base 20..21: mod_base = OTHER; note = thymine
  misc_feature 1..21: note = Description of Artificial Sequence: Synthetic oligonucleotide
  misc_feature 1..21: note = Description of Combined DNA/RNA Molecule: Synthetic oligonucleotide
  source 1..21: mol_type = other RNA
tcttctttgccaaactgaatt

SEQ ID NO: 180 - RNA, 21 nt, synthetic construct
  modified_base 20..21: mod_base = OTHER; note = thymine
  misc_feature 1..21: note = Description of Artificial Sequence: Synthetic oligonucleotide
  misc_feature 1..21: note = Description of Combined DNA/RNA Molecule: Synthetic oligonucleotide
  source 1..21: mol_type = other RNA
tgccaaactgaactgccgatt

SEQ ID NO: 181 - RNA, 21 nt, synthetic construct
  modified_base 20..21: mod_base = OTHER; note = thymine
  misc_feature 1..21: note = Description of Artificial Sequence: Synthetic oligonucleotide
  misc_feature 1..21: note = Description of Combined DNA/RNA Molecule: Synthetic oligonucleotide
  source 1..21: mol_type = other RNA
ccaaactgaactgccgacttt

SEQ ID NO: 182 - RNA, 21 nt, synthetic construct
  modified_base 20..21: mod_base = OTHER; note = thymine
  misc_feature 1..21: note = Description of Artificial Sequence: Synthetic oligonucleotide
  misc_feature 1..21: note = Description of Combined DNA/RNA Molecule: Synthetic oligonucleotide
  source 1..21: mol_type = other RNA
actgaactgccgactctattt

SEQ ID NO: 183 - RNA, 21 nt, synthetic construct
  modified_base 20..21: mod_base = OTHER; note = thymine
  misc_feature 1..21: note = Description of Artificial Sequence: Synthetic oligonucleotide
  misc_feature 1..21: note = Description of Combined DNA/RNA Molecule: Synthetic oligonucleotide
  source 1..21: mol_type = other RNA
gaactgccgactctatcgatt

SEQ ID NO: 184 - RNA, 21 nt, synthetic construct
  modified_base 20..21: mod_base = OTHER; note = thymine
  misc_feature 1..21: note = Description of Artificial Sequence: Synthetic oligonucleotide
  misc_feature 1..21: note = Description of Combined DNA/RNA Molecule: Synthetic oligonucleotide
  source 1..21: mol_type = other RNA
ctgccgactctatcgaaaatt

SEQ ID NO: 185 - RNA, 21 nt, synthetic construct
  modified_base 20..21: mod_base = OTHER; note = thymine
  misc_feature 1..21: note = Description of Artificial Sequence: Synthetic oligonucleotide
  misc_feature 1..21: note = Description of Combined DNA/RNA Molecule: Synthetic oligonucleotide
  source 1..21: mol_type = other RNA
ctggttaacaccatttacttt

SEQ ID NO: 186 - RNA, 21 nt, synthetic construct
  modified_base 20..21: mod_base = OTHER; note = thymine
  misc_feature 1..21: note = Description of Artificial Sequence: Synthetic oligonucleotide
  misc_feature 1..21: note = Description of Combined DNA/RNA Molecule: Synthetic oligonucleotide
  source 1..21: mol_type = other RNA
tgtgcagatgtccacagggtt

SEQ ID NO: 187 - RNA, 21 nt, synthetic construct
  modified_base 20..21: mod_base = OTHER; note = thymine
  misc_feature 1..21: note = Description of Artificial Sequence: Synthetic oligonucleotide
  misc_feature 1..21: note = Description of Combined DNA/RNA Molecule: Synthetic oligonucleotide
  source 1..21: mol_type = other RNA
tgctgatagaaagtggtagtt

SEQ ID NO: 188 - RNA, 21 nt, synthetic construct
  modified_base 20..21: mod_base = OTHER; note = thymine
  misc_feature 1..21: note = Description of Artificial Sequence: Synthetic oligonucleotide
  misc_feature 1..21: note = Description of Combined DNA/RNA Molecule: Synthetic oligonucleotide
  source 1..21: mol_type = other RNA
tttgttggcttttcgatagtt

SEQ ID NO: 189 - RNA, 21 nt, synthetic construct
  modified_base 20..21: mod_base = OTHER; note = thymine
  misc_feature 1..21: note = Description of Artificial Sequence: Synthetic oligonucleotide
  misc_feature 1..21: note = Description of Combined DNA/RNA Molecule: Synthetic oligonucleotide
  source 1..21: mol_type = other RNA
tgcattttccttgaagtcctt

SEQ ID NO: 190 - RNA, 21 nt, synthetic construct
  modified_base 20..21: mod_base = OTHER; note = thymine
  misc_feature 1..21: note = Description of Artificial Sequence: Synthetic oligonucleotide
  misc_feature 1..21: note = Description of Combined DNA/RNA Molecule: Synthetic oligonucleotide
  source 1..21: mol_type = other RNA
tgaagtaaatggtgttaactt

SEQ ID NO: 191 - RNA, 21 nt, synthetic construct
  modified_base 20..21: mod_base = OTHER; note = thymine
  misc_feature 1..21: note = Description of Artificial Sequence: Synthetic oligonucleotide
  misc_feature 1..21: note = Description of Combined DNA/RNA Molecule: Synthetic oligonucleotide
  source 1..21: mol_type = other RNA
ttctcttataaaaaccaggtt

SEQ ID NO: 192 - RNA, 21 nt, synthetic construct
  modified_base 20..21: mod_base = OTHER; note = thymine
  misc_feature 1..21: note = Description of Artificial Sequence: Synthetic oligonucleotide
  misc_feature 1..21: note = Description of Combined DNA/RNA Molecule: Synthetic oligonucleotide
  source 1..21: mol_type = other RNA
tgggattcatgggaatgtctt

SEQ ID NO: 193 - RNA, 21 nt, synthetic construct
  modified_base 20..21: mod_base = OTHER; note = thymine
  misc_feature 1..21: note = Description of Artificial Sequence: Synthetic oligonucleotide
  misc_feature 1..21: note = Description of Combined DNA/RNA Molecule: Synthetic oligonucleotide
  source 1..21: mol_type = other RNA
tcttggaatctgccaggtgtt

SEQ ID NO: 194 - RNA, 21 nt, synthetic construct
  modified_base 20..21: mod_base = OTHER; note = thymine
  misc_feature 1..21: note = Description of Artificial Sequence: Synthetic oligonucleotide
  misc_feature 1..21: note = Description of Combined DNA/RNA Molecule: Synthetic oligonucleotide
  source 1..21: mol_type = other RNA
aggatttgttggcttttcgtt

SEQ ID NO: 195 - RNA, 21 nt, synthetic construct
  modified_base 20..21: mod_base = OTHER; note = thymine
  misc_feature 1..21: note = Description of Artificial Sequence: Synthetic oligonucleotide
  misc_feature 1..21: note = Description of Combined DNA/RNA Molecule: Synthetic oligonucleotide
  source 1..21: mol_type = other RNA
tggattgctctgcattttctt

SEQ ID NO: 196 - RNA, 21 nt, synthetic construct
  modified_base 20..21: mod_base = OTHER; note = thymine
  misc_feature 1..21: note = Description of Artificial Sequence: Synthetic oligonucleotide
  misc_feature 1..21: note = Description of Combined DNA/RNA Molecule: Synthetic oligonucleotide
  source 1..21: mol_type = other RNA
actttgacttccacaggcctt

SEQ ID NO: 197 - RNA, 21 nt, synthetic construct
  modified_base 20..21: mod_base = OTHER; note = thymine
  misc_feature 1..21: note = Description of Artificial Sequence: Synthetic oligonucleotide
  misc_feature 1..21: note = Description of Combined DNA/RNA Molecule: Synthetic oligonucleotide
  source 1..21: mol_type = other RNA
tagtgttcagaggaacttctt

SEQ ID NO: 198 - RNA, 21 nt, synthetic construct
  modified_base 20..21: mod_base = OTHER; note = thymine
  misc_feature 1..21: note = Description of Artificial Sequence: Synthetic oligonucleotide
  misc_feature 1..21: note = Description of Combined DNA/RNA Molecule: Synthetic oligonucleotide
  source 1..21: mol_type = other RNA
atgcacatgggattcatggtt

SEQ ID NO: 199 - RNA, 21 nt, synthetic construct
  modified_base 20..21: mod_base = OTHER; note = thymine
  misc_feature 1..21: note = Description of Artificial Sequence: Synthetic oligonucleotide
  misc_feature 1..21: note = Description of Combined DNA/RNA Molecule: Synthetic oligonucleotide
  source 1..21: mol_type = other RNA
taaatacctccatcagttgtt

SEQ ID NO: 200 - RNA, 21 nt, synthetic construct
  modified_base 20..21: mod_base = OTHER; note = thymine
  misc_feature 1..21: note = Description of Artificial Sequence: Synthetic oligonucleotide
  misc_feature 1..21: note = Description of Combined DNA/RNA Molecule: Synthetic oligonucleotide
  source 1..21: mol_type = other RNA
ttggctgatactaacttggtt

SEQ ID NO: 201 - RNA, 21 nt, synthetic construct
  modified_base 20..21: mod_base = OTHER; note = thymine
  misc_feature 1..21: note = Description of Artificial Sequence: Synthetic oligonucleotide
  misc_feature 1..21: note = Description of Combined DNA/RNA Molecule: Synthetic oligonucleotide
  source 1..21: mol_type = other RNA
acccatttgttgatggccgtt

SEQ ID NO: 202 - RNA, 21 nt, synthetic construct
  modified_base 20..21: mod_base = OTHER; note = thymine
  misc_feature 1..21: note = Description of Artificial Sequence: Synthetic oligonucleotide
  misc_feature 1..21: note = Description of Combined DNA/RNA Molecule: Synthetic oligonucleotide
  source 1..21: mol_type = other RNA
tcaaactgaagccgtcctctt

SEQ ID NO: 203 - RNA, 21 nt, synthetic construct
  modified_base 20..21: mod_base = OTHER; note = thymine
  misc_feature 1..21: note = Description of Artificial Sequence: Synthetic oligonucleotide
  misc_feature 1..21: note = Description of Combined DNA/RNA Molecule: Synthetic oligonucleotide
  source 1..21: mol_type = other RNA
agataatagtgttcagaggtt

SEQ ID NO: 204 - RNA, 21 nt, synthetic construct
  modified_base 20..21: mod_base = OTHER; note = thymine
  misc_feature 1..21: note = Description of Artificial Sequence: Synthetic oligonucleotide
  misc_feature 1..21: note = Description of Combined DNA/RNA Molecule: Synthetic oligonucleotide
  source 1..21: mol_type = other RNA
aatgcacatgggattcatgtt

SEQ ID NO: 205 - RNA, 21 nt, synthetic construct
  modified_base 20..21: mod_base = OTHER; note = thymine
  misc_feature 1..21: note = Description of Artificial Sequence: Synthetic oligonucleotide
  misc_feature 1..21: note = Description of Combined DNA/RNA Molecule: Synthetic oligonucleotide
  source 1..21: mol_type = other RNA
aaacttaaatacctccatctt

SEQ ID NO: 206 - RNA, 21 nt, synthetic construct
  modified_base 20..21: mod_base = OTHER; note = thymine
  misc_feature 1..21: note = Description of Artificial Sequence: Synthetic oligonucleotide
  misc_feature 1..21: note = Description of Combined DNA/RNA Molecule: Synthetic oligonucleotide
  source 1..21: mol_type = other RNA
aaaggcgattggctgatactt

SEQ ID NO: 207 - RNA, 21 nt, synthetic construct
  modified_base 20..21: mod_base = OTHER; note = thymine
  misc_feature 1..21: note = Description of Artificial Sequence: Synthetic oligonucleotide
  misc_feature 1..21: note = Description of Combined DNA/RNA Molecule: Synthetic oligonucleotide
  source 1..21: mol_type = other RNA
tcggtcttattggacaccctt

SEQ ID NO: 208 - RNA, 21 nt, synthetic construct
  modified_base 20..21: mod_base = OTHER; note = thymine
  misc_feature 1..21: note = Description of Artificial Sequence: Synthetic oligonucleotide
  misc_feature 1..21: note = Description of Combined DNA/RNA Molecule: Synthetic oligonucleotide
  source 1..21: mol_type = other RNA
tttggacttttcagggctgtt

SEQ ID NO: 209 - RNA, 21 nt, synthetic construct
  modified_base 20..21: mod_base = OTHER; note = thymine
  misc_feature 1..21: note = Description of Artificial Sequence: Synthetic oligonucleotide
  misc_feature 1..21: note = Description of Combined DNA/RNA Molecule: Synthetic oligonucleotide
  source 1..21: mol_type = other RNA
agcggtaaatgcacatgggtt

SEQ ID NO: 210 - RNA, 21 nt, synthetic construct
  modified_base 20..21: mod_base = OTHER; note = thymine
  misc_feature 1..21: note = Description of Artificial Sequence: Synthetic oligonucleotide
  misc_feature 1..21: note = Description of Combined DNA/RNA Molecule: Synthetic oligonucleotide
  source 1..21: mol_type = other RNA
tggtgtcaaacttaaatactt

SEQ ID NO: 211 - RNA, 21 nt, synthetic construct
  modified_base 20..21: mod_base = OTHER; note = thymine
  misc_feature 1..21: note = Description of Artificial Sequence: Synthetic oligonucleotide
  misc_feature 1..21: note = Description of Combined DNA/RNA Molecule: Synthetic oligonucleotide
  source 1..21: mol_type = other RNA
tgaaggtaagggatttgtctt

SEQ ID NO: 212 - RNA, 21 nt, synthetic construct
  modified_base 20..21: mod_base = OTHER; note = thymine
  misc_feature 1..21: note = Description of Artificial Sequence: Synthetic oligonucleotide
  misc_feature 1..21: note = Description of Combined DNA/RNA Molecule: Synthetic oligonucleotide
  source 1..21: mol_type = other RNA
ttaaccagcaccagaacagtt

SEQ ID NO: 213 - RNA, 21 nt, synthetic construct
  modified_base 20..21: mod_base = OTHER; note = thymine
  misc_feature 1..21: note = Description of Artificial Sequence: Synthetic oligonucleotide
  misc_feature 1..21: note = Description of Combined DNA/RNA Molecule: Synthetic oligonucleotide
  source 1..21: mol_type = other RNA
acaatacctgggagtttggtt

SEQ ID NO: 214 - RNA, 21 nt, synthetic construct
  modified_base 20..21: mod_base = OTHER; note = thymine
  misc_feature 1..21: note = Description of Artificial Sequence: Synthetic oligonucleotide
  misc_feature 1..21: note = Description of Combined DNA/RNA Molecule: Synthetic oligonucleotide
  source 1..21: mol_type = other RNA
aaagtggtagcaaagcgggtt

SEQ ID NO: 215 - RNA, 21 nt, synthetic construct
  modified_base 20..21: mod_base = OTHER; note = thymine
  misc_feature 1..21: note = Description of Artificial Sequence: Synthetic oligonucleotide
  misc_feature 1..21: note = Description of Combined DNA/RNA Molecule: Synthetic oligonucleotide
  source 1..21: mol_type = other RNA
aggtctcattgaaggtaagtt

SEQ ID NO: 216 - RNA, 21 nt, synthetic construct
  modified_base 20..21: mod_base = OTHER; note = thymine
  misc_feature 1..21: note = Description of Artificial Sequence: Synthetic oligonucleotide
  misc_feature 1..21: note = Description of Combined DNA/RNA Molecule: Synthetic oligonucleotide
  source 1..21: mol_type = other RNA
tggtgttaaccagcaccagtt

SEQ ID NO: 217 - RNA, 21 nt, synthetic construct
  modified_base 20..21: mod_base = OTHER; note = thymine
  misc_feature 1..21: note = Description of Artificial Sequence: Synthetic oligonucleotide
  misc_feature 1..21: note = Description of Combined DNA/RNA Molecule: Synthetic oligonucleotide
  source 1..21: mol_type = other RNA
aacaatacctgggagtttgtt

SEQ ID NO: 218 - RNA, 21 nt, synthetic construct
  modified_base 20..21: mod_base = OTHER; note = thymine
  misc_feature 1..21: note = Description of Artificial Sequence: Synthetic oligonucleotide
  misc_feature 1..21: note = Description of Combined DNA/RNA Molecule: Synthetic oligonucleotide
  source 1..21: mol_type = other RNA
tagaaagtggtagcaaagctt

SEQ ID NO: 219 - RNA, 21 nt, synthetic construct
  modified_base 20..21: mod_base = OTHER; note = thymine
  misc_feature 1..21: note = Description of Artificial Sequence: Synthetic oligonucleotide
  misc_feature 1..21: note = Description of Combined DNA/RNA Molecule: Synthetic oligonucleotide
  source 1..21: mol_type = other RNA
tcactgatgtcctggtaggtt

SEQ ID NO: 220 - RNA, 21 nt, synthetic construct
  modified_base 20..21: mod_base = OTHER; note = thymine
  misc_feature 1..21: note = Description of Artificial Sequence: Synthetic oligonucleotide
  misc_feature 1..21: note = Description of Combined DNA/RNA Molecule: Synthetic oligonucleotide
  source 1..21: mol_type = other RNA
aatggtgttaaccagcacctt

SEQ ID NO: 221 - RNA, 21 nt, synthetic construct
  modified_base 20..21: mod_base = OTHER; note = thymine
  misc_feature 1..21: note = Description of Artificial Sequence: Synthetic oligonucleotide
  misc_feature 1..21: note = Description of Combined DNA/RNA Molecule: Synthetic oligonucleotide
  source 1..21: mol_type = other RNA
ttggggtttagcgaacggctt

SEQ ID NO: 222 - RNA, 21 nt, synthetic construct
  modified_base 20..21: mod_base = OTHER; note = thymine
  misc_feature 1..21: note = Description of Artificial Sequence: Synthetic oligonucleotide
  misc_feature 1..21: note = Description of Combined DNA/RNA Molecule: Synthetic oligonucleotide
  source 1..21: mol_type = other RNA
taccaactcactgatgtcctt

SEQ ID NO: 223 - RNA, 21 nt, synthetic construct
  modified_base 20..21: mod_base = OTHER; note = thymine
  misc_feature 1..21: note = Description of Artificial Sequence: Synthetic oligonucleotide
  misc_feature 1..21: note = Description of Combined DNA/RNA Molecule: Synthetic oligonucleotide
  source 1..21: mol_type = other RNA
aaatggtgttaaccagcactt

SEQ ID NO: 224 - RNA, 21 nt, synthetic construct
  modified_base 20..21: mod_base = OTHER; note = thymine
  misc_feature 1..21: note = Description of Artificial Sequence: Synthetic oligonucleotide
  misc_feature 1..21: note = Description of Combined DNA/RNA Molecule: Synthetic oligonucleotide
  source 1..21: mol_type = other RNA
tataaaaaccaggaaaggctt

SEQ ID NO: 225 - RNA, 21 nt, synthetic construct
  modified_base 20..21: mod_base = OTHER; note = thymine
  misc_feature 1..21: note = Description of Artificial Sequence: Synthetic oligonucleotide
  misc_feature 1..21: note = Description of Combined DNA/RNA Molecule: Synthetic oligonucleotide
  source 1..21: mol_type = other RNA
agcttggtcatagcaaaagtt

SEQ ID NO: 226 - RNA, 21 nt, synthetic construct
  modified_base 20..21: mod_base = OTHER; note = thymine
  misc_feature 1..21: note = Description of Artificial Sequence: Synthetic oligonucleotide
  misc_feature 1..21: note = Description of Combined DNA/RNA Molecule: Synthetic oligonucleotide
  source 1..21: mol_type = other RNA
aacttgccttcctggtacatt

SEQ ID NO: 227 - RNA, 21 nt, synthetic construct
  modified_base 20..21: mod_base = OTHER; note = thymine
  misc_feature 1..21: note = Description of Artificial Sequence: Synthetic oligonucleotide
  misc_feature 1..21: note = Description of Combined DNA/RNA Molecule: Synthetic oligonucleotide
  source 1..21: mol_type = other RNA
tgcccatgaagataatagttt

SEQ ID NO: 228 - RNA, 21 nt, synthetic construct
  modified_base 20..21: mod_base = OTHER; note = thymine
  misc_feature 1..21: note = Description of Artificial Sequence: Synthetic oligonucleotide
  misc_feature 1..21: note = Description of Combined DNA/RNA Molecule: Synthetic oligonucleotide
  source 1..21: mol_type = other RNA
ttggctactctgcccatgatt

SEQ ID NO: 229 - RNA, 21 nt, synthetic construct
  modified_base 20..21: mod_base = OTHER; note = thymine
  misc_feature 1..21: note = Description of Artificial Sequence: Synthetic oligonucleotide
  misc_feature 1..21: note = Description of Combined DNA/RNA Molecule: Synthetic oligonucleotide
  source 1..21: mol_type = other RNA
aggcccttgaagtaaatggtt

SEQ ID NO: 230 - RNA, 21 nt, synthetic construct
  modified_base 20..21: mod_base = OTHER; note = thymine
  misc_feature 1..21: note = Description of Artificial Sequence: Synthetic oligonucleotide
  misc_feature 1..21: note = Description of Combined DNA/RNA Molecule: Synthetic oligonucleotide
  source 1..21: mol_type = other RNA
tccacaggcccttgaagtatt

SEQ ID NO: 231 - RNA, 21 nt, synthetic construct
  modified_base 20..21: mod_base = OTHER; note = thymine
  misc_feature 1..21: note = Description of Artificial Sequence: Synthetic oligonucleotide
  misc_feature 1..21: note = Description of Combined DNA/RNA Molecule: Synthetic oligonucleotide
  source 1..21: mol_type = other RNA
ttccacaggcccttgaagttt

SEQ ID NO: 232 - RNA, 21 nt, synthetic construct
  modified_base 20..21: mod_base = OTHER; note = thymine
  misc_feature 1..21: note = Description of Artificial Sequence: Synthetic oligonucleotide
  misc_feature 1..21: note = Description of Combined DNA/RNA Molecule: Synthetic oligonucleotide
  source 1..21: mol_type = other RNA
tggcttttcgatagagtcgtt

SEQ ID NO: 233 - RNA, 21 nt, synthetic construct
  modified_base 20..21: mod_base = OTHER; note = thymine
  misc_feature 1..21: note = Description of Artificial Sequence: Synthetic oligonucleotide
  misc_feature 1..21: note = Description of Combined DNA/RNA Molecule: Synthetic oligonucleotide
  source 1..21: mol_type = other RNA
ttcgatagagtcggcagtttt

SEQ ID NO: 234 - RNA, 21 nt, synthetic construct
  modified_base 20..21: mod_base = OTHER; note = thymine
  misc_feature 1..21: note = Description of Artificial Sequence: Synthetic oligonucleotide
  misc_feature 1..21: note = Description of Combined DNA/RNA Molecule: Synthetic oligonucleotide
  source 1..21: mol_type = other RNA
tttcgatagagtcggcagttt

SEQ ID NO: 235 - RNA, 21 nt, synthetic construct
  modified_base 20..21: mod_base = OTHER; note = thymine
  misc_feature 1..21: note = Description of Artificial Sequence: Synthetic oligonucleotide
  misc_feature 1..21: note = Description of Combined DNA/RNA Molecule: Synthetic oligonucleotide
  source 1..21: mol_type = other RNA
ttggcttttcgatagagtctt

SEQ ID NO: 236 - RNA, 21 nt, synthetic construct
  modified_base 20..21: mod_base = OTHER; note = thymine
  misc_feature 1..21: note = Description of Artificial Sequence: Synthetic oligonucleotide
  misc_feature 1..21: note = Description of Combined DNA/RNA Molecule: Synthetic oligonucleotide
  source 1..21: mol_type = other RNA
ttcagtttggcaaagaagatt

SEQ ID NO: 237 - RNA, 21 nt, synthetic construct
  modified_base 20..21: mod_base = OTHER; note = thymine
  misc_feature 1..21: note = Description of Artificial Sequence: Synthetic oligonucleotide
  misc_feature 1..21: note = Description of Combined DNA/RNA Molecule: Synthetic oligonucleotide
  source 1..21: mol_type = other RNA
tcggcagttcagtttggcatt

SEQ ID NO: 238 - RNA, 21 nt, synthetic construct
  modified_base 20..21: mod_base = OTHER; note = thymine
  misc_feature 1..21: note = Description of Artificial Sequence: Synthetic oligonucleotide
  misc_feature 1..21: note = Description of Combined DNA/RNA Molecule: Synthetic oligonucleotide
  source 1..21: mol_type = other RNA
agtcggcagttcagtttggtt

SEQ ID NO: 239 - RNA, 21 nt, synthetic construct
  modified_base 20..21: mod_base = OTHER; note = thymine
  misc_feature 1..21: note = Description of Artificial Sequence: Synthetic oligonucleotide
  misc_feature 1..21: note = Description of Combined DNA/RNA Molecule: Synthetic oligonucleotide
  source 1..21: mol_type = other RNA
atagagtcggcagttcagttt

SEQ ID NO: 240 - RNA, 21 nt, synthetic construct
  modified_base 20..21: mod_base = OTHER; note = thymine
  misc_feature 1..21: note = Description of Artificial Sequence: Synthetic oligonucleotide
  misc_feature 1..21: note = Description of Combined DNA/RNA Molecule: Synthetic oligonucleotide
  source 1..21: mol_type = other RNA
tcgatagagtcggcagttctt

SEQ ID NO: 241 - RNA, 21 nt, synthetic construct
  modified_base 20..21: mod_base = OTHER; note = thymine
  misc_feature 1..21: note = Description of Artificial Sequence: Synthetic oligonucleotide
  misc_feature 1..21: note = Description of Combined DNA/RNA Molecule: Synthetic oligonucleotide
  source 1..21: mol_type = other RNA
ttttcgatagagtcggcagtt

SEQ ID NO: 242 - RNA, 21 nt, synthetic construct
  modified_base 20..21: mod_base = OTHER; note = thymine
  misc_feature 1..21: note = Description of Artificial Sequence: Synthetic oligonucleotide
  misc_feature 1..21: note = Description of Combined DNA/RNA Molecule: Synthetic oligonucleotide
  source 1..21: mol_type = other RNA
agtaaatggtgttaaccagtt

SEQ ID NO: 243 - RNA, 21 nt, synthetic construct
  modified_base 20..21: mod_base = OTHER; note = thymine
  misc_feature 1..21: note = Description of Artificial Sequence: Synthetic oligonucleotide
  misc_feature 1..21: note = Description of Combined DNA/RNA Molecule: Synthetic oligonucleotide
  source 1..21: mol_type = other RNA
ctatcgaaaagccaacaaatt

SEQ ID NO: 244 - RNA, 21 nt, synthetic construct
  modified_base 20..21: mod_base = OTHER; note = thymine
  misc_feature 1..21: note = Description of Artificial Sequence: Synthetic oligonucleotide
  misc_feature 1..21: note = Description of Combined DNA/RNA Molecule: Synthetic oligonucleotide
  source 1..21: mol_type = other RNA
ctatcgaaaagccaacaaatt

SEQ ID NO: 245 - RNA, 21 nt, synthetic construct
  modified_base 20..21: mod_base = OTHER; note = thymine
  misc_feature 1..21: note = Description of Artificial Sequence: Synthetic oligonucleotide
  misc_feature 1..21: note = Description of Combined DNA/RNA Molecule: Synthetic oligonucleotide
  source 1..21: mol_type = other RNA
ctatcgaaaagccaacaaatt

SEQ ID NO: 246 - RNA, 21 nt, synthetic construct
  modified_base 20..21: mod_base = OTHER; note = thymine
  misc_feature 1..21: note = Description of Artificial Sequence: Synthetic oligonucleotide
  misc_feature 1..21: note = Description of Combined DNA/RNA Molecule: Synthetic oligonucleotide
  source 1..21: mol_type = other RNA
ctatcgaaaagccaacaaatt

SEQ ID NO: 247 - RNA, 21 nt, synthetic construct
  modified_base 20..21: mod_base = OTHER; note = thymine
  misc_feature 1..21: note = Description of Artificial Sequence: Synthetic oligonucleotide
  misc_feature 1..21: note = Description of Combined DNA/RNA Molecule: Synthetic oligonucleotide
  source 1..21: mol_type = other RNA
ctatcgaaaagccaacaaatt

SEQ ID NO: 248 - RNA, 21 nt, synthetic construct
  modified_base 20..21: mod_base = OTHER; note = thymine
  misc_feature 1..21: note = Description of Artificial Sequence: Synthetic oligonucleotide
  misc_feature 1..21: note = Description of Combined DNA/RNA Molecule: Synthetic oligonucleotide
  source 1..21: mol_type = other RNA
ctatcgaaaagccaacaaatt

SEQ ID NO: 249 - RNA, 21 nt, synthetic construct
  modified_base 20..21: mod_base = OTHER; note = thymine
  misc_feature 1..21: note = Description of Artificial Sequence: Synthetic oligonucleotide
  misc_feature 1..21: note = Description of Combined DNA/RNA Molecule: Synthetic oligonucleotide
  source 1..21: mol_type = other RNA
ctatcgaaaagccaacaaatt

SEQ ID NO: 250 - RNA, 21 nt, synthetic construct
  modified_base 20..21: mod_base = OTHER; note = thymine
  misc_feature 1..21: note = Description of Artificial Sequence: Synthetic oligonucleotide
  misc_feature 1..21: note = Description of Combined DNA/RNA Molecule: Synthetic oligonucleotide
  source 1..21: mol_type = other RNA
ctatcgaaaagccaacaaatt

SEQ ID NO: 251 - RNA, 21 nt, synthetic construct
  modified_base 20..21: mod_base = OTHER; note = thymine
  misc_feature 1..21: note = Description of Artificial Sequence: Synthetic oligonucleotide
  misc_feature 1..21: note = Description of Combined DNA/RNA Molecule: Synthetic oligonucleotide
  source 1..21: mol_type = other RNA
ctatcgaaaagccaacaaatt

SEQ ID NO: 252 - RNA, 21 nt, synthetic construct
  modified_base 20..21: mod_base = OTHER; note = thymine
  misc_feature 1..21: note = Description of Artificial Sequence: Synthetic oligonucleotide
  misc_feature 1..21: note = Description of Combined DNA/RNA Molecule: Synthetic oligonucleotide
  source 1..21: mol_type = other RNA
ctatcgaaaagccaacaaatt

SEQ ID NO: 253 - RNA, 21 nt, synthetic construct
  modified_base 20..21: mod_base = OTHER; note = thymine
  misc_feature 1..21: note = Description of Artificial Sequence: Synthetic oligonucleotide
  misc_feature 1..21: note = Description of Combined DNA/RNA Molecule: Synthetic oligonucleotide
  source 1..21: mol_type = other RNA
ctatcgaaaagccaacaaatt

SEQ ID NO: 254 - RNA, 21 nt, synthetic construct
  modified_base 20..21: mod_base = OTHER; note = thymine
  misc_feature 1..21: note = Description of Artificial Sequence: Synthetic oligonucleotide
  misc_feature 1..21: note = Description of Combined DNA/RNA Molecule: Synthetic oligonucleotide
  source 1..21: mol_type = other RNA
ctatcgaaaagccaacaaatt

SEQ ID NO: 255 - RNA, 21 nt, synthetic construct
  modified_base 20..21: mod_base = OTHER; note = thymine
  misc_feature 1..21: note = Description of Artificial Sequence: Synthetic oligonucleotide
  misc_feature 1..21: note = Description of Combined DNA/RNA Molecule: Synthetic oligonucleotide
  source 1..21: mol_type = other RNA
ctatcgaaaagccaacaaatt

SEQ ID NO: 256 - RNA, 21 nt, synthetic construct
  modified_base 20..21: mod_base = OTHER; note = thymine
  misc_feature 1..21: note = Description of Artificial Sequence: Synthetic oligonucleotide
  misc_feature 1..21: note = Description of Combined DNA/RNA Molecule: Synthetic oligonucleotide
  source 1..21: mol_type = other RNA
ccatgaatcccatgtgcattt

SEQ ID NO: 257 - RNA, 21 nt, synthetic construct
  modified_base 20..21: mod_base = OTHER; note = thymine
  misc_feature 1..21: note = Description of Artificial Sequence: Synthetic oligonucleotide
  misc_feature 1..21: note = Description of Combined DNA/RNA Molecule: Synthetic oligonucleotide
  source 1..21: mol_type = other RNA
ccatgaatcccatgtgcattt

SEQ ID NO: 258 - RNA, 21 nt, synthetic construct
  modified_base 20..21: mod_base = OTHER; note = thymine
  misc_feature 1..21: note = Description of Artificial Sequence: Synthetic oligonucleotide
  misc_feature 1..21: note = Description of Combined DNA/RNA Molecule: Synthetic oligonucleotide
  source 1..21: mol_type = other RNA
ccatgaatcccatgtgcattt

SEQ ID NO: 259 - RNA, 21 nt, synthetic construct
  modified_base 20..21: mod_base = OTHER; note = thymine
  misc_feature 1..21: note = Description of Artificial Sequence: Synthetic oligonucleotide
  misc_feature 1..21: note = Description of Combined DNA/RNA Molecule: Synthetic oligonucleotide
  source 1..21: mol_type = other RNA
ccatgaatcccatgtgcattt

SEQ ID NO: 260 - RNA, 21 nt, synthetic construct
  modified_base 20..21: mod_base = OTHER; note = thymine
  misc_feature 1..21: note = Description of Artificial Sequence: Synthetic oligonucleotide
  misc_feature 1..21: note = Description of Combined DNA/RNA Molecule: Synthetic oligonucleotide
  source 1..21: mol_type = other RNA
ccatgaatcccatgtgcattt

SEQ ID NO: 261 - RNA, 21 nt, synthetic construct
  modified_base 20..21: mod_base = OTHER; note = thymine
  misc_feature 1..21: note = Description of Artificial Sequence: Synthetic oligonucleotide
  misc_feature 1..21: note = Description of Combined DNA/RNA Molecule: Synthetic oligonucleotide
  source 1..21: mol_type = other RNA
ccatgaatcccatgtgcattt

SEQ ID NO: 262 - RNA, 21 nt, synthetic construct
  modified_base 20..21: mod_base = OTHER; note = thymine
  misc_feature 1..21: note = Description of Artificial Sequence: Synthetic oligonucleotide
  misc_feature 1..21: note = Description of Combined DNA/RNA Molecule: Synthetic oligonucleotide
  source 1..21: mol_type = other RNA
ccatgaatcccatgtgcattt

SEQ ID NO: 263 - RNA, 21 nt, synthetic construct
  modified_base 20..21: mod_base = OTHER; note = thymine
  misc_feature 1..21: note = Description of Artificial Sequence: Synthetic oligonucleotide
  misc_feature 1..21: note = Description of Combined DNA/RNA Molecule: Synthetic oligonucleotide
  source 1..21: mol_type = other RNA
ccatgaatcccatgtgcattt

SEQ ID NO: 264 - RNA, 21 nt, synthetic construct
  modified_base 20..21: mod_base = OTHER; note = thymine
  misc_feature 1..21: note = Description of Artificial Sequence: Synthetic oligonucleotide
  misc_feature 1..21: note = Description of Combined DNA/RNA Molecule: Synthetic oligonucleotide
  source 1..21: mol_type = other RNA
ccatgaatcccatgtgcattt

SEQ ID NO: 265 - RNA, 21 nt, synthetic construct
  modified_base 20..21: mod_base = OTHER; note = thymine
  misc_feature 1..21: note = Description of Artificial Sequence: Synthetic oligonucleotide
  misc_feature 1..21: note = Description of Combined DNA/RNA Molecule: Synthetic oligonucleotide
  source 1..21: mol_type = other RNA
ccatgaatcccatgtgcattt

SEQ ID NO: 266 - RNA, 21 nt, synthetic construct
  modified_base 20..21: mod_base = OTHER; note = thymine
  misc_feature 1..21: note = Description of Artificial Sequence: Synthetic oligonucleotide
  misc_feature 1..21: note = Description of Combined DNA/RNA Molecule: Synthetic oligonucleotide
  source 1..21: mol_type = other RNA
ccatgaatcccatgtgcattt

SEQ ID NO: 267 - RNA, 21 nt, synthetic construct
  modified_base 20..21: mod_base = OTHER; note = thymine
  misc_feature 1..21: note = Description of Artificial Sequence: Synthetic oligonucleotide
  misc_feature 1..21: note = Description of Combined DNA/RNA Molecule: Synthetic oligonucleotide
  source 1..21: mol_type = other RNA
ccatgaatcccatgtgcattt

SEQ ID NO: 268 - RNA, 21 nt, synthetic construct
  modified_base 20..21: mod_base = OTHER; note = thymine
  misc_feature 1..21: note = Description of Artificial Sequence: Synthetic oligonucleotide
  misc_feature 1..21: note = Description of Combined DNA/RNA Molecule: Synthetic oligonucleotide
  source 1..21: mol_type = other RNA
ccatgaatcccatgtgcattt

SEQ ID NO: 269 - RNA, 21 nt, synthetic construct
  modified_base 20..21: mod_base = OTHER; note = thymine
  misc_feature 1..21: note = Description of Artificial Sequence: Synthetic oligonucleotide
  misc_feature 1..21: note = Description of Combined DNA/RNA Molecule: Synthetic oligonucleotide
  source 1..21: mol_type = other RNA
ctgccgactctatcgaaaatt

SEQ ID NO: 270 - RNA, 21 nt, synthetic construct
  modified_base 20..21: mod_base = OTHER; note = thymine
  misc_feature 1..21: note = Description of Artificial Sequence: Synthetic oligonucleotide
  misc_feature 1..21: note = Description of Combined DNA/RNA Molecule: Synthetic oligonucleotide
  source 1..21: mol_type = other RNA
ctgccgactctatcgaaaatt

SEQ ID NO: 271 - RNA, 21 nt, synthetic construct
  modified_base 20..21: mod_base = OTHER; note = thymine
  misc_feature 1..21: note = Description of Artificial Sequence: Synthetic oligonucleotide
  misc_feature 1..21: note = Description of Combined DNA/RNA Molecule: Synthetic oligonucleotide
  source 1..21: mol_type = other RNA
ctgccgactctatcgaaaatt

SEQ ID NO: 272 - RNA, 21 nt, synthetic construct
  modified_base 20..21: mod_base = OTHER; note = thymine
  misc_feature 1..21: note = Description of Artificial Sequence: Synthetic oligonucleotide
  misc_feature 1..21: note = Description of Combined DNA/RNA Molecule: Synthetic oligonucleotide
  source 1..21: mol_type = other RNA
ctgccgactctatcgaaaatt

SEQ ID NO: 273 - RNA, 21 nt, synthetic construct
  modified_base 20..21: mod_base = OTHER; note = thymine
  misc_feature 1..21: note = Description of Artificial Sequence: Synthetic oligonucleotide
  misc_feature 1..21: note = Description of Combined DNA/RNA Molecule: Synthetic oligonucleotide
  source 1..21: mol_type = other RNA
ctgccgactctatcgaaaatt

SEQ ID NO: 274 - RNA, 21 nt, synthetic construct
  modified_base 20..21: mod_base = OTHER; note = thymine
  misc_feature 1..21: note = Description of Artificial Sequence: Synthetic oligonucleotide
  misc_feature 1..21: note = Description of Combined DNA/RNA Molecule: Synthetic oligonucleotide
  source 1..21: mol_type = other RNA
ctgccgactctatcgaaaatt

SEQ ID NO: 275 - RNA, 21 nt, synthetic construct
  modified_base 20..21: mod_base = OTHER; note = thymine
  misc_feature 1..21: note = Description of Artificial Sequence: Synthetic oligonucleotide
  misc_feature 1..21: note = Description of Combined DNA/RNA Molecule: Synthetic oligonucleotide
  source 1..21: mol_type = other RNA
ctgccgactctatcgaaaatt

SEQ ID NO: 276 - RNA, 21 nt, synthetic construct
  modified_base 20..21: mod_base = OTHER; note = thymine
  misc_feature 1..21: note = Description of Artificial Sequence: Synthetic oligonucleotide
  misc_feature 1..21: note = Description of Combined DNA/RNA Molecule: Synthetic oligonucleotide
  source 1..21: mol_type = other RNA
ctgccgactctatcgaaaatt

SEQ ID NO: 277 - RNA, 21 nt, synthetic construct
  modified_base 20..21: mod_base = OTHER; note = thymine
  misc_feature 1..21: note = Description of Artificial Sequence: Synthetic oligonucleotide
  misc_feature 1..21: note = Description of Combined DNA/RNA Molecule: Synthetic oligonucleotide
  source 1..21: mol_type = other RNA
ctgccgactctatcgaaaatt

SEQ ID NO: 278 - RNA, 21 nt, synthetic construct
  modified_base 20..21: mod_base = OTHER; note = thymine
  misc_feature 1..21: note = Description of Artificial Sequence: Synthetic oligonucleotide
  misc_feature 1..21: note = Description of Combined DNA/RNA Molecule: Synthetic oligonucleotide
  source 1..21: mol_type = other RNA
ctgccgactctatcgaaaatt

SEQ ID NO: 279 - RNA, 21 nt, synthetic construct
  modified_base 20..21: mod_base = OTHER; note = thymine
  misc_feature 1..21: note = Description of Artificial Sequence: Synthetic oligonucleotide
  misc_feature 1..21: note = Description of Combined DNA/RNA Molecule: Synthetic oligonucleotide
  source 1..21: mol_type = other RNA
ctgccgactctatcgaaaatt

SEQ ID NO: 280 - RNA, 21 nt, synthetic construct
  modified_base 20..21: mod_base = OTHER; note = thymine
  misc_feature 1..21: note = Description of Artificial Sequence: Synthetic oligonucleotide
  misc_feature 1..21: note = Description of Combined DNA/RNA Molecule: Synthetic oligonucleotide
  source 1..21: mol_type = other RNA
ctgccgactctatcgaaaatt

SEQ ID NO: 281 - RNA, 21 nt, synthetic construct
  modified_base 20..21: mod_base = OTHER; note = thymine
  misc_feature 1..21: note = Description of Artificial Sequence: Synthetic oligonucleotide
  misc_feature 1..21: note = Description of Combined DNA/RNA Molecule: Synthetic oligonucleotide
  source 1..21: mol_type = other RNA
ctgccgactctatcgaaaatt

SEQ ID NO: 282 - RNA, 21 nt, synthetic construct
  modified_base 20..21: mod_base = OTHER; note = thymine
  misc_feature 1..21: note = Description of Artificial Sequence: Synthetic oligonucleotide
  misc_feature 1..21: note = Description of Combined DNA/RNA Molecule: Synthetic oligonucleotide
  source 1..21: mol_type = other RNA
tcttctttgccaaactgaatt

SEQ ID NO: 283 - RNA, 21 nt, synthetic construct
  modified_base 20..21: mod_base = OTHER; note = thymine
  misc_feature 1..21: note = Description of Artificial Sequence: Synthetic oligonucleotide
  misc_feature 1..21: note = Description of Combined DNA/RNA Molecule: Synthetic oligonucleotide
  source 1..21: mol_type = other RNA
tcttctttgccaaactgaatt

SEQ ID NO: 284 - RNA, 21 nt, synthetic construct
  modified_base 20..21: mod_base = OTHER; note = thymine
  misc_feature 1..21: note = Description of Artificial Sequence: Synthetic oligonucleotide
  misc_feature 1..21: note = Description of Combined DNA/RNA Molecule: Synthetic oligonucleotide
  source 1..21: mol_type = other RNA
tcttctttgccaaactgaatt

SEQ ID NO: 285 - RNA, 21 nt, synthetic construct
  modified_base 20..21: mod_base = OTHER; note = thymine
  misc_feature 1..21: note = Description of Artificial Sequence: Synthetic oligonucleotide
  misc_feature 1..21: note = Description of Combined DNA/RNA Molecule: Synthetic oligonucleotide
  source 1..21: mol_type = other RNA
tcttctttgccaaactgaatt

SEQ ID NO: 286 - RNA, 21 nt, synthetic construct
  modified_base 20..21: mod_base = OTHER; note = thymine
  misc_feature 1..21: note = Description of Artificial Sequence: Synthetic oligonucleotide
  misc_feature 1..21: note = Description of Combined DNA/RNA Molecule: Synthetic oligonucleotide
  source 1..21: mol_type = other RNA
tcttctttgccaaactgaatt

SEQ ID NO: 287 - RNA, 21 nt, synthetic construct
  modified_base 20..21: mod_base = OTHER; note = thymine
  misc_feature 1..21: note = Description of Artificial Sequence: Synthetic oligonucleotide
  misc_feature 1..21: note = Description of Combined DNA/RNA Molecule: Synthetic oligonucleotide
  source 1..21: mol_type = other RNA
tcttctttgccaaactgaatt

SEQ ID NO: 288 - RNA, 21 nt, synthetic construct
  modified_base 20..21: mod_base = OTHER; note = thymine
  misc_feature 1..21: note = Description of Artificial Sequence: Synthetic oligonucleotide
  misc_feature 1..21: note = Description of Combined DNA/RNA Molecule: Synthetic oligonucleotide
  source 1..21: mol_type = other RNA
tcttctttgccaaactgaatt

SEQ ID NO: 289 - RNA, 21 nt, synthetic construct
  modified_base 20..21: mod_base = OTHER; note = thymine
  misc_feature 1..21: note = Description of Artificial Sequence: Synthetic oligonucleotide
  misc_feature 1..21: note = Description of Combined DNA/RNA Molecule: Synthetic oligonucleotide
  source 1..21: mol_type = other RNA
tcttctttgccaaactgaatt

SEQ ID NO: 290 - RNA, 21 nt, synthetic construct
  modified_base 20..21: mod_base = OTHER; note = thymine
  misc_feature 1..21: note = Description of Artificial Sequence: Synthetic oligonucleotide
  misc_feature 1..21: note = Description of Combined DNA/RNA Molecule: Synthetic oligonucleotide
  source 1..21: mol_type = other RNA
tcttctttgccaaactgaatt

SEQ ID NO: 291 - RNA, 21 nt, synthetic construct
  modified_base 20..21: mod_base = OTHER; note = thymine
  misc_feature 1..21: note = Description of Artificial Sequence: Synthetic oligonucleotide
  misc_feature 1..21: note = Description of Combined DNA/RNA Molecule: Synthetic oligonucleotide
  source 1..21: mol_type = other RNA
tcttctttgccaaactgaatt

SEQ ID NO: 292 - RNA, 21 nt, synthetic construct
  modified_base 20..21: mod_base = OTHER; note = thymine
  misc_feature 1..21: note = Description of Artificial Sequence: Synthetic oligonucleotide
  misc_feature 1..21: note = Description of Combined DNA/RNA Molecule: Synthetic oligonucleotide
  source 1..21: mol_type = other RNA
tcttctttgccaaactgaatt

SEQ ID NO: 293 - RNA, 21 nt, synthetic construct
  modified_base 20..21: mod_base = OTHER; note = thymine
  misc_feature 1..21: note = Description of Artificial Sequence: Synthetic oligonucleotide
  misc_feature 1..21: note = Description of Combined DNA/RNA Molecule: Synthetic oligonucleotide
  source 1..21: mol_type = other RNA
tcttctttgccaaactgaatt

SEQ ID NO: 294 - RNA, 21 nt, synthetic construct
  misc_feature 1..21: note = Description of Artificial Sequence: Synthetic oligonucleotide
  source 1..21: mol_type = other RNA
ggttaacaccatttacttcaa

SEQ ID NO: 295 - RNA, 21 nt, synthetic construct
  misc_feature 1..21: note = Description of Artificial Sequence: Synthetic oligonucleotide
  source 1..21: mol_type = other RNA
tagtatcagccaatcgccttt

SEQ ID NO: 296 - RNA, 21 nt, synthetic construct
  misc_feature 1..21: note = Description of Artificial Sequence: Synthetic oligonucleotide
  source 1..21: mol_type = other RNA
cgctttgctaccactttctat

SEQ ID NO: 297 - RNA, 21 nt, synthetic construct
  misc_feature 1..21: note = Description of Artificial Sequence: Synthetic oligonucleotide
  source 1..21: mol_type = other RNA
ctttgctaccactttctatca

SEQ ID NO: 298 - RNA, 21 nt, synthetic construct
  misc_feature 1..21: note = Description of Artificial Sequence: Synthetic oligonucleotide
  source 1..21: mol_type = other RNA
atcgaaaagccaacaaatcct

SEQ ID NO: 299 - RNA, 21 nt, synthetic construct
  misc_feature 1..21: note = Description of Artificial Sequence: Synthetic oligonucleotide
  source 1..21: mol_type = other RNA
tcccatgaatcccatgtgcat

SEQ ID NO: 300 - RNA, 21 nt, synthetic construct
  misc_feature 1..21: note = Description of Artificial Sequence: Synthetic oligonucleotide
  source 1..21: mol_type = other RNA
taaggcatttcttgaggtaaa

SEQ ID NO: 301 - RNA, 21 nt, synthetic construct
  misc_feature 1..21: note = Description of Artificial Sequence: Synthetic oligonucleotide
  source 1..21: mol_type = other RNA
gcaactgatggaggtatttaa

SEQ ID NO: 302 - RNA, 21 nt, synthetic construct
  misc_feature 1..21: note = Description of Artificial Sequence: Synthetic oligonucleotide
  source 1..21: mol_type = other RNA
tttaagtttgacaccatatct

SEQ ID NO: 303 - RNA, 21 nt, synthetic construct
  misc_feature 1..21: note = Description of Artificial Sequence: Synthetic oligonucleotide
  source 1..21: mol_type = other RNA
ccatgaatcccatgtgcattt

SEQ ID NO: 304 - RNA, 21 nt, synthetic construct
  misc_feature 1..21: note = Description of Artificial Sequence: Synthetic oligonucleotide
  source 1..21: mol_type = other RNA
tgctggttaacaccatttact

SEQ ID NO: 305 - RNA, 21 nt, synthetic construct
  misc_feature 1..21: note = Description of Artificial Sequence: Synthetic oligonucleotide
  source 1..21: mol_type = other RNA
tctatcgaaaagccaacaaat

SEQ ID NO: 306 - RNA, 21 nt, synthetic construct
  misc_feature 1..21: note = Description of Artificial Sequence: Synthetic oligonucleotide
  source 1..21: mol_type = other RNA
ttcccgctttgctaccacttt

SEQ ID NO: 307 - RNA, 21 nt, synthetic construct
  misc_feature 1..21: note = Description of Artificial Sequence: Synthetic oligonucleotide
  source 1..21: mol_type = other RNA
gatggaggtatttaagtttga

SEQ ID NO: 308 - RNA, 21 nt, synthetic construct
  misc_feature 1..21: note = Description of Artificial Sequence: Synthetic oligonucleotide
  source 1..21: mol_type = other RNA
agacaaatcccttaccttcaa

SEQ ID NO: 309 - RNA, 21 nt, synthetic construct
  misc_feature 1..21: note = Description of Artificial Sequence: Synthetic oligonucleotide
  source 1..21: mol_type = other RNA
tgctaccactttctatcagca

SEQ ID NO: 310 - RNA, 21 nt, synthetic construct
  misc_feature 1..21: note = Description of Artificial Sequence: Synthetic oligonucleotide
  source 1..21: mol_type = other RNA
tgtattccaatgtgataggaa

SEQ ID NO: 311 - RNA, 21 nt, synthetic construct
  misc_feature 1..21: note = Description of Artificial Sequence: Synthetic oligonucleotide
  source 1..21: mol_type = other RNA
aactgccgactctatcgaaaa

SEQ ID NO: 312 - RNA, 21 nt, synthetic construct
  misc_feature 1..21: note = Description of Artificial Sequence: Synthetic oligonucleotide
  source 1..21: mol_type = other RNA
gccgactctatcgaaaagcca

SEQ ID NO: 313 - RNA, 21 nt, synthetic construct
  misc_feature 1..21: note = Description of Artificial Sequence: Synthetic oligonucleotide
  source 1..21: mol_type = other RNA
tatttaagtttgacaccatat

SEQ ID NO: 314 - RNA, 21 nt, synthetic construct
  misc_feature 1..21: note = Description of Artificial Sequence: Synthetic oligonucleotide
  source 1..21: mol_type = other RNA
tgggccttgtcgatctgttca

SEQ ID NO: 315 - RNA, 21 nt, synthetic construct
  misc_feature 1..21: note = Description of Artificial Sequence: Synthetic oligonucleotide
  source 1..21: mol_type = other RNA
caaatcccttaccttcaatga

SEQ ID NO: 316 - RNA, 21 nt, synthetic construct
  misc_feature 1..21: note = Description of Artificial Sequence: Synthetic oligonucleotide
  source 1..21: mol_type = other RNA
tccaaactcccaggtattgtt

SEQ ID NO: 317 - RNA, 21 nt, synthetic construct
  misc_feature 1..21: note = Description of Artificial Sequence: Synthetic oligonucleotide
  source 1..21: mol_type = other RNA
gaactgccgactctatcgaaa

SEQ ID NO: 318 - RNA, 21 nt, synthetic construct
  misc_feature 1..21: note = Description of Artificial Sequence: Synthetic oligonucleotide
  source 1..21: mol_type = other RNA
tcaacaaatgggtgtccaata

SEQ ID NO: 319 - RNA, 21 nt, synthetic construct
  misc_feature 1..21: note = Description of Artificial Sequence: Synthetic oligonucleotide
  source 1..21: mol_type = other RNA
cactgttctggtgctggttaa

SEQ ID NO: 320 - RNA, 21 nt, synthetic construct
  misc_feature 1..21: note = Description of Artificial Sequence: Synthetic oligonucleotide
  source 1..21: mol_type = other RNA
ggacggcttcagtttgaagga

SEQ ID NO: 321 - RNA, 21 nt, synthetic construct
  misc_feature 1..21: note = Description of Artificial Sequence: Synthetic oligonucleotide
  source 1..21: mol_type = other RNA
ctggacttcaaggaaaatgca

SEQ ID NO: 322 - RNA, 21 nt, synthetic construct
  misc_feature 1..21: note = Description of Artificial Sequence: Synthetic oligonucleotide
  source 1..21: mol_type = other RNA
aggtatttaagtttgacacca

SEQ ID NO: 323 - RNA, 21 nt, synthetic construct
  misc_feature 1..21: note = Description of Artificial Sequence: Synthetic oligonucleotide
  source 1..21: mol_type = other RNA
ttacttcaagggcctgtggaa

SEQ ID NO: 324 - RNA, 21 nt, synthetic construct
  misc_feature 1..21: note = Description of Artificial Sequence: Synthetic oligonucleotide
  source 1..21: mol_type = other RNA
tttttggagacaaatccctta

SEQ ID NO: 325 - RNA, 21 nt, synthetic construct
  misc_feature 1..21: note = Description of Artificial Sequence: Synthetic oligonucleotide
  source 1..21: mol_type = other RNA
gattgctggccgttcgctaaa

SEQ ID NO: 326 - RNA, 21 nt, synthetic construct
  misc_feature 1..21: note = Description of Artificial Sequence: Synthetic oligonucleotide
  source 1..21: mol_type = other RNA
ccgactctatcgaaaagccaa

SEQ ID NO: 327 - RNA, 21 nt, synthetic construct
  misc_feature 1..21: note = Description of Artificial Sequence: Synthetic oligonucleotide
  source 1..21: mol_type = other RNA
caccatttacttcaagggcct

SEQ ID NO: 328 - RNA, 21 nt, synthetic construct
  misc_feature 1..21: note = Description of Artificial Sequence: Synthetic oligonucleotide
  source 1..21: mol_type = other RNA
caagctgggtgcctgtaatga

SEQ ID NO: 329 - RNA, 21 nt, synthetic construct
  misc_feature 1..21: note = Description of Artificial Sequence: Synthetic oligonucleotide
  source 1..21: mol_type = other RNA
acactattatcttcatgggca

SEQ ID NO: 330 - RNA, 21 nt, synthetic construct
  misc_feature 1..21: note = Description of Artificial Sequence: Synthetic oligonucleotide
  source 1..21: mol_type = other RNA
aggaaaatgcagagcaatcca

SEQ ID NO: 331 - RNA, 21 nt, synthetic construct
  misc_feature 1..21: note = Description of Artificial Sequence: Synthetic oligonucleotide
  source 1..21: mol_type = other RNA
tctggtgctggttaacaccat

SEQ ID NO: 332 - RNA, 21 nt, synthetic construct
  misc_feature 1..21: note = Description of Artificial Sequence: Synthetic oligonucleotide
  source 1..21: mol_type = other RNA
agccctgtggacatctgcaca

SEQ ID NO: 333 - RNA, 21 nt, synthetic construct
  misc_feature 1..21: note = Description of Artificial Sequence: Synthetic oligonucleotide
  source 1..21: mol_type = other RNA
cttcttctttgccaaactgaa

SEQ ID NO: 334 - RNA, 21 nt, synthetic construct
  misc_feature 1..21: note = Description of Artificial Sequence: Synthetic oligonucleotide
  source 1..21: mol_type = other RNA
tctccacggcttttgctatga

SEQ ID NO: 335 - RNA, 21 nt, synthetic construct
  misc_feature 1..21: note = Description of Artificial Sequence: Synthetic oligonucleotide
  source 1..21: mol_type = other RNA
gcacctggcagattccaagaa

SEQ ID NO: 336 - RNA, 21 nt, synthetic construct
  misc_feature 1..21: note = Description of Artificial Sequence: Synthetic oligonucleotide
  source 1..21: mol_type = other RNA
cttcatgggcagagtagccaa

SEQ ID NO: 337 - RNA, 21 nt, synthetic construct
  misc_feature 1..21: note = Description of Artificial Sequence: Synthetic oligonucleotide
  source 1..21: mol_type = other RNA
ctccaagttagtatcagccaa

SEQ ID NO: 338 - RNA, 21 nt, synthetic construct
  misc_feature 1..21: note = Description of Artificial Sequence: Synthetic oligonucleotide
  source 1..21: mol_type = other RNA
ggttaacaccatttacttcaa

SEQ ID NO: 339 - RNA, 21 nt, synthetic construct
  misc_feature 1..21: note = Description of Artificial Sequence: Synthetic oligonucleotide
  source 1..21: mol_type = other RNA
ggttaacaccatttacttcaa

SEQ ID NO: 340 - RNA, 21 nt, synthetic construct
  misc_feature 1..21: note = Description of Artificial Sequence: Synthetic oligonucleotide
  source 1..21: mol_type = other RNA
ggttaacaccatttacttcaa

SEQ ID NO: 341 - RNA, 21 nt, synthetic construct
  misc_feature 1..21: note = Description of Artificial Sequence: Synthetic oligonucleotide
  source 1..21: mol_type = other RNA
ggttaacaccatttacttcaa

SEQ ID NO: 342 - RNA, 21 nt, synthetic construct
  misc_feature 1..21: note = Description of Artificial Sequence: Synthetic oligonucleotide
  source 1..21: mol_type = other RNA
ggttaacaccatttacttcaa

SEQ ID NO: 343 - RNA, 21 nt, synthetic construct
  misc_feature 1..21: note = Description of Artificial Sequence: Synthetic oligonucleotide
  source 1..21: mol_type = other RNA
ggttaacaccatttacttcaa

SEQ ID NO: 344 - RNA, 21 nt, synthetic construct
  misc_feature 1..21: note = Description of Artificial Sequence: Synthetic oligonucleotide
  source 1..21: mol_type = other RNA
ggttaacaccatttacttcaa

SEQ ID NO: 345 - RNA, 21 nt, synthetic construct
  misc_feature 1..21: note = Description of Artificial Sequence: Synthetic oligonucleotide
  source 1..21: mol_type = other RNA
ggttaacaccatttacttcaa

SEQ ID NO: 346 - RNA, 21 nt, synthetic construct
  misc_feature 1..21: note = Description of Artificial Sequence: Synthetic oligonucleotide
  source 1..21: mol_type = other RNA
ggttaacaccatttacttcaa

SEQ ID NO: 347 - RNA, 21 nt, synthetic construct
  misc_feature 1..21: note = Description of Artificial Sequence: Synthetic oligonucleotide
  source 1..21: mol_type = other RNA
ggttaacaccatttacttcaa

SEQ ID NO: 348 - RNA, 21 nt, synthetic construct
  misc_feature 1..21: note = Description of Artificial Sequence: Synthetic oligonucleotide
  source 1..21: mol_type = other RNA
ggttaacaccatttacttcaa

SEQ ID NO: 349 - RNA, 21 nt, synthetic construct
  misc_feature 1..21: note = Description of Artificial Sequence: Synthetic oligonucleotide
  source 1..21: mol_type = other RNA
ggttaacaccatttacttcaa

SEQ ID NO: 350 - RNA, 21 nt, synthetic construct
  misc_feature 1..21: note = Description of Artificial Sequence: Synthetic oligonucleotide
  source 1..21: mol_type = other RNA
ggttaacaccatttacttcaa

SEQ ID NO: 351 - RNA, 21 nt, synthetic construct
  misc_feature 1..21: note = Description of Artificial Sequence: Synthetic oligonucleotide
  source 1..21: mol_type = other RNA
ggttaacaccatttacttcaa

SEQ ID NO: 352 - RNA, 21 nt, synthetic construct
  misc_feature 1..21: note = Description of Artificial Sequence: Synthetic oligonucleotide
  source 1..21: mol_type = other RNA
ggttaacaccatttacttcaa

SEQ ID NO: 353 - RNA, 21 nt, synthetic construct
  misc_feature 1..21: note = Description of Artificial Sequence: Synthetic oligonucleotide
  source 1..21: mol_type = other RNA
ggttaacaccatttacttcaa

SEQ ID NO: 354 - RNA, 21 nt, synthetic construct
  misc_feature 1..21: note = Description of Artificial Sequence: Synthetic oligonucleotide
  source 1..21: mol_type = other RNA
ggttaacaccatttacttcaa

SEQ ID NO: 355 - RNA, 21 nt, synthetic construct
  misc_feature 1..21: note = Description of Artificial Sequence: Synthetic oligonucleotide
  source 1..21: mol_type = other RNA
ggttaacaccatttacttcaa

SEQ ID NO: 356 - RNA, 21 nt, synthetic construct
  misc_feature 1..21: note = Description of Artificial Sequence: Synthetic oligonucleotide
  source 1..21: mol_type = other RNA
ggttaacaccatttacttcaa

SEQ ID NO: 357 - RNA, 21 nt, synthetic construct
  misc_feature 1..21: note = Description of Artificial Sequence: Synthetic oligonucleotide
  source 1..21: mol_type = other RNA
ggttaacaccatttacttcaa

SEQ ID NO: 358 - RNA, 21 nt, synthetic construct
  misc_feature 1..21: note = Description of Artificial Sequence: Synthetic oligonucleotide
  source 1..21: mol_type = other RNA
ggttaacaccatttacttcaa

SEQ ID NO: 359 - RNA, 21 nt, synthetic construct
  misc_feature 1..21: note = Description of Artificial Sequence: Synthetic oligonucleotide
  source 1..21: mol_type = other RNA
ggttaacaccatttacttcaa

SEQ ID NO: 360 - RNA, 21 nt, synthetic construct
  misc_feature 1..21: note = Description of Artificial Sequence: Synthetic oligonucleotide
  source 1..21: mol_type = other RNA
ggttaacaccatttacttcaa

SEQ ID NO: 361 - RNA, 21 nt, synthetic construct
  misc_feature 1..21: note = Description of Artificial Sequence: Synthetic oligonucleotide
  source 1..21: mol_type = other RNA
ggttaacaccatttacttcaa

SEQ ID NO: 362 - RNA, 21 nt, synthetic construct
  misc_feature 1..21: note = Description of Artificial Sequence: Synthetic oligonucleotide
  source 1..21: mol_type = other RNA
ggttaacaccatttacttcaa

SEQ ID NO: 363 - RNA, 21 nt, synthetic construct
  misc_feature 1..21: note = Description of Artificial Sequence: Synthetic oligonucleotide
  source 1..21: mol_type = other RNA
ggttaacaccatttacttcaa

SEQ ID NO: 364 - RNA, 21 nt, synthetic construct
  misc_feature 1..21: note = Description of Artificial Sequence: Synthetic oligonucleotide
  source 1..21: mol_type = other RNA
ggttaacaccatttacttcaa

SEQ ID NO: 365 - RNA, 21 nt, synthetic construct
  misc_feature 1..21: note = Description of Artificial Sequence: Synthetic oligonucleotide
  source 1..21: mol_type = other RNA
ggttaacaccatttacttcaa

SEQ ID NO: 366 - RNA, 21 nt, synthetic construct
  misc_feature 1..21: note = Description of Artificial Sequence: Synthetic oligonucleotide
  source 1..21: mol_type = other RNA
ggttaacaccatttacttcaa

SEQ ID NO: 367 - RNA, 21 nt, synthetic construct
  misc_feature 1..21: note = Description of Artificial Sequence: Synthetic oligonucleotide
  source 1..21: mol_type = other RNA
ggttaacaccatttacttcaa

SEQ ID NO: 368 - RNA, 21 nt, synthetic construct
  misc_feature 1..21: note = Description of Artificial Sequence: Synthetic oligonucleotide
  source 1..21: mol_type = other RNA
ggttaacaccatttacttcaa

SEQ ID NO: 369 - RNA, 21 nt, synthetic construct
  misc_feature 1..21: note = Description of Artificial Sequence: Synthetic oligonucleotide
  source 1..21: mol_type = other RNA
ggttaacaccatttacttcaa

SEQ ID NO: 370 - RNA, 21 nt, synthetic construct
  misc_feature 1..21: note = Description of Artificial Sequence: Synthetic oligonucleotide
  source 1..21: mol_type = other RNA
ggttaacaccatttacttcaa

SEQ ID NO: 371 - RNA, 21 nt, synthetic construct
  misc_feature 1..21: note = Description of Artificial Sequence: Synthetic oligonucleotide
  source 1..21: mol_type = other RNA
ggttaacaccatttacttcaa

SEQ ID NO: 372 - RNA, 21 nt, synthetic construct
  misc_feature 1..21: note = Description of Artificial Sequence: Synthetic oligonucleotide
  source 1..21: mol_type = other RNA
ggttaacaccatttacttcaa

SEQ ID NO: 373 - RNA, 21 nt, synthetic construct
  misc_feature 1..21: note = Description of Artificial Sequence: Synthetic oligonucleotide
  source 1..21: mol_type = other RNA
ggttaacaccatttacttcaa

SEQ ID NO: 374 - RNA, 21 nt, synthetic construct
  misc_feature 1..21: note = Description of Artificial Sequence: Synthetic oligonucleotide
  source 1..21: mol_type = other RNA
ggttaacaccatttacttcaa

SEQ ID NO: 375 - RNA, 21 nt, synthetic construct
  misc_feature 1..21: note = Description of Artificial Sequence: Synthetic oligonucleotide
  source 1..21: mol_type = other RNA
ggttaacaccatttacttcaa

SEQ ID NO: 376 - RNA, 21 nt, synthetic construct
  misc_feature 1..21: note = Description of Artificial Sequence: Synthetic oligonucleotide
  source 1..21: mol_type = other RNA
ggttaacaccatttacttcaa

SEQ ID NO: 377 - RNA, 21 nt, synthetic construct
  misc_feature 1..21: note = Description of Artificial Sequence: Synthetic oligonucleotide
  source 1..21: mol_type = other RNA
ggttaacaccatttacttcaa

SEQ ID NO: 378 - RNA, 21 nt, synthetic construct
  misc_feature 1..21: note = Description of Artificial Sequence: Synthetic oligonucleotide
  source 1..21: mol_type = other RNA
ggttaacaccatttacttcaa

SEQ ID NO: 379 - RNA, 21 nt, synthetic construct
  misc_feature 1..21: note = Description of Artificial Sequence: Synthetic oligonucleotide
  source 1..21: mol_type = other RNA
ggttaacaccatttacttcaa

SEQ ID NO: 380 - RNA, 21 nt, synthetic construct
  misc_feature 1..21: note = Description of Artificial Sequence: Synthetic oligonucleotide
  source 1..21: mol_type = other RNA
ggttaacaccatttacttcaa

SEQ ID NO: 381 - RNA, 21 nt, synthetic construct
  misc_feature 1..21: note = Description of Artificial Sequence: Synthetic oligonucleotide
  source 1..21: mol_type = other RNA
ggttaacaccatttacttcaa

SEQ ID NO: 382 - RNA, 21 nt, synthetic construct
  misc_feature 1..21: note = Description of Artificial Sequence: Synthetic oligonucleotide
  source 1..21: mol_type = other RNA
ggttaacaccatttacttcaa

SEQ ID NO: 383 - RNA, 21 nt, synthetic construct
  misc_feature 1..21: note = Description of Artificial Sequence: Synthetic oligonucleotide
  source 1..21: mol_type = other RNA
ggttaacaccatttacttcaa

SEQ ID NO: 384 - RNA, 21 nt, synthetic construct
  misc_feature 1..21: note = Description of Artificial Sequence: Synthetic oligonucleotide
  source 1..21: mol_type = other RNA
ggttaacaccatttacttcaa

SEQ ID NO: 385 - RNA, 21 nt, synthetic construct
  misc_feature 1..21: note = Description of Artificial Sequence: Synthetic oligonucleotide
  source 1..21: mol_type = other RNA
ggttaacaccatttacttcaa

SEQ ID NO: 386 - RNA, 21 nt, synthetic construct
  misc_feature 1..21: note = Description of Artificial Sequence: Synthetic oligonucleotide
  source 1..21: mol_type = other RNA
ggttaacaccatttacttcaa

SEQ ID NO: 387 - RNA, 21 nt, synthetic construct
  misc_feature 1..21: note = Description of Artificial Sequence: Synthetic oligonucleotide
  source 1..21: mol_type = other RNA
ggttaacaccatttacttcaa

SEQ ID NO: 388 - RNA, 21 nt, synthetic construct
  misc_feature 1..21: note = Description of Artificial Sequence: Synthetic oligonucleotide
  source 1..21: mol_type = other RNA
ggttaacaccatttacttcaa

SEQ ID NO: 389 - RNA, 21 nt, synthetic construct
  misc_feature 1..21: note = Description of Artificial Sequence: Synthetic oligonucleotide
  source 1..21: mol_type = other RNA
ggttaacaccatttacttcaa

SEQ ID NO: 390 - RNA, 21 nt, synthetic construct
  misc_feature 1..21: note = Description of Artificial Sequence: Synthetic oligonucleotide
  source 1..21: mol_type = other RNA
ggttaacaccatttacttcaa

SEQ ID NO: 391 - RNA, 21 nt, synthetic construct
  misc_feature 1..21: note = Description of Artificial Sequence: Synthetic oligonucleotide
  source 1..21: mol_type = other RNA
ggttaacaccatttacttcaa

SEQ ID NO: 392 - RNA, 21 nt, synthetic construct
  misc_feature 1..21: note = Description of Artificial Sequence: Synthetic oligonucleotide
  source 1..21: mol_type = other RNA
ggttaacaccatttacttcaa

SEQ ID NO: 393 - RNA, 21 nt, synthetic construct
  misc_feature 1..21: note = Description of Artificial Sequence: Synthetic oligonucleotide
  source 1..21: mol_type = other RNA
ggttaacaccatttacttcaa

SEQ ID NO: 394 - RNA, 21 nt, synthetic construct
  misc_feature 1..21: note = Description of Artificial Sequence: Synthetic oligonucleotide
  source 1..21: mol_type = other RNA
ggttaacaccatttacttcaa

SEQ ID NO: 395 - RNA, 21 nt, synthetic construct
  misc_feature 1..21: note = Description of Artificial Sequence: Synthetic oligonucleotide
  source 1..21: mol_type = other RNA
ggttaacaccatttacttcaa

SEQ ID NO: 396 - RNA, 21 nt, synthetic construct
  misc_feature 1..21: note = Description of Artificial Sequence: Synthetic oligonucleotide
  source 1..21: mol_type = other RNA
ggttaacaccatttacttcaa

SEQ ID NO: 397 - RNA, 21 nt, synthetic construct
  misc_feature 1..21: note = Description of Artificial Sequence: Synthetic oligonucleotide
  source 1..21: mol_type = other RNA
ggttaacaccatttacttcaa

SEQ ID NO: 398 - RNA, 21 nt, synthetic construct
  misc_feature 1..21: note = Description of Artificial Sequence: Synthetic oligonucleotide
  source 1..21: mol_type = other RNA
ggttaacaccatttacttcaa

SEQ ID NO: 399 - RNA, 21 nt, synthetic construct
  misc_feature 1..21: note = Description of Artificial Sequence: Synthetic oligonucleotide
  source 1..21: mol_type = other RNA
ggttaacaccatttacttcaa

SEQ ID NO: 400 - RNA, 21 nt, synthetic construct
  misc_feature 1..21: note = Description of Artificial Sequence: Synthetic oligonucleotide
  source 1..21: mol_type = other RNA
ggttaacaccatttacttcaa

SEQ ID NO: 401 - RNA, 21 nt, synthetic construct
  misc_feature 1..21: note = Description of Artificial Sequence: Synthetic oligonucleotide
  source 1..21: mol_type = other RNA
ggttaacaccatttacttcaa

SEQ ID NO: 402 - RNA, 21 nt, synthetic construct
  misc_feature 1..21: note = Description of Artificial Sequence: Synthetic oligonucleotide
  source 1..21: mol_type = other RNA
ggttaacaccatttacttcaa

SEQ ID NO: 403 - RNA, 21 nt, synthetic construct
  misc_feature 1..21: note = Description of Artificial Sequence: Synthetic oligonucleotide
  source 1..21: mol_type = other RNA
ggttaacaccatttacttcaa

SEQ ID NO: 404 - RNA, 21 nt, synthetic construct
  misc_feature 1..21: note = Description of Artificial Sequence: Synthetic oligonucleotide
  source 1..21: mol_type = other RNA
ggttaacaccatttacttcaa

SEQ ID NO: 405 - RNA, 21 nt, synthetic construct
  misc_feature 1..21: note = Description of Artificial Sequence: Synthetic oligonucleotide
  source 1..21: mol_type = other RNA
ggttaacaccatttacttcaa

SEQ ID NO: 406 - RNA, 21 nt, synthetic construct
  misc_feature 1..21: note = Description of Artificial Sequence: Synthetic oligonucleotide
  source 1..21: mol_type = other RNA
ggttaacaccatttacttcaa

SEQ ID NO: 407 - RNA, 21 nt, synthetic construct
  misc_feature 1..21: note = Description of Artificial Sequence: Synthetic oligonucleotide
  source 1..21: mol_type = other RNA
ggttaacaccatttacttcaa

SEQ ID NO: 408 - RNA, 21 nt, synthetic construct
  misc_feature 1..21: note = Description of Artificial Sequence: Synthetic oligonucleotide
  source 1..21: mol_type = other RNA
ggttaacaccatttacttcaa

SEQ ID NO: 409 - RNA, 21 nt, synthetic construct
  misc_feature 1..21: note = Description of Artificial Sequence: Synthetic oligonucleotide
  source 1..21: mol_type = other RNA
ggttaacaccatttacttcaa

SEQ ID NO: 410 - RNA, 21 nt, synthetic construct
  misc_feature 1..21: note = Description of Artificial Sequence: Synthetic oligonucleotide
  source 1..21: mol_type = other RNA
ggttaacaccatttacttcaa

SEQ ID NO: 411 - RNA, 21 nt, synthetic construct
  misc_feature 1..21: note = Description of Artificial Sequence: Synthetic oligonucleotide
  source 1..21: mol_type = other RNA
ggttaacaccatttacttcaa

SEQ ID NO: 412 - RNA, 21 nt, synthetic construct
  misc_feature 1..21: note = Description of Artificial Sequence: Synthetic oligonucleotide
  source 1..21: mol_type = other RNA
ggttaacaccatttacttcaa

SEQ ID NO: 413 - RNA, 21 nt, synthetic construct
  misc_feature 1..21: note = Description of Artificial Sequence: Synthetic oligonucleotide
  source 1..21: mol_type = other RNA
ggttaacaccatttacttcaa

SEQ ID NO: 414 - RNA, 21 nt, synthetic construct
  misc_feature 1..21: note = Description of Artificial Sequence: Synthetic oligonucleotide
  source 1..21: mol_type = other RNA
ggttaacaccatttacttcaa

SEQ ID NO: 415 - RNA, 21 nt, synthetic construct
  misc_feature 1..21: note = Description of Artificial Sequence: Synthetic oligonucleotide
  source 1..21: mol_type = other RNA
ggttaacaccatttacttcaa

SEQ ID NO: 416 - RNA, 21 nt, synthetic construct
  misc_feature 1..21: note = Description of Artificial Sequence: Synthetic oligonucleotide
  source 1..21: mol_type = other RNA
ggttaacaccatttacttcaa

SEQ ID NO: 417 - RNA, 21 nt, synthetic construct
  misc_feature 1..21: note = Description of Artificial Sequence: Synthetic oligonucleotide
  source 1..21: mol_type = other RNA
ggttaacaccatttacttcaa

SEQ ID NO: 418 - RNA, 21 nt, synthetic construct
  misc_feature 1..21: note = Description of Artificial Sequence: Synthetic oligonucleotide
  source 1..21: mol_type = other RNA
ggttaacaccatttacttcaa

SEQ ID NO: 419 - RNA, 21 nt, synthetic construct
  misc_feature 1..21: note = Description of Artificial Sequence: Synthetic oligonucleotide
  source 1..21: mol_type = other RNA
ggttaacaccatttacttcaa

SEQ ID NO: 420 - RNA, 21 nt, synthetic construct
  misc_feature 1..21: note = Description of Artificial Sequence: Synthetic oligonucleotide
  source 1..21: mol_type = other RNA
ggttaacaccatttacttcaa

SEQ ID NO: 421 - RNA, 21 nt, synthetic construct
  misc_feature 1..21: note = Description of Artificial Sequence: Synthetic oligonucleotide
  source 1..21: mol_type = other RNA
ggttaacaccatttacttcaa

SEQ ID NO: 422 - RNA, 21 nt, synthetic construct
  misc_feature 1..21: note = Description of Artificial Sequence: Synthetic oligonucleotide
  source 1..21: mol_type = other RNA
ggttaacaccatttacttcaa

SEQ ID NO: 423 - RNA, 21 nt, synthetic construct
  misc_feature 1..21: note = Description of Artificial Sequence: Synthetic oligonucleotide
  source 1..21: mol_type = other RNA
ggttaacaccatttacttcaa

SEQ ID NO: 424 - RNA, 21 nt, synthetic construct
  misc_feature 1..21: note = Description of Artificial Sequence: Synthetic oligonucleotide
  source 1..21: mol_type = other RNA
ggttaacaccatttacttcaa

SEQ ID NO: 425 - RNA, 21 nt, synthetic construct
  misc_feature 1..21: note = Description of Artificial Sequence: Synthetic oligonucleotide
  source 1..21: mol_type = other RNA
ggttaacaccatttacttcaa

SEQ ID NO: 426 - RNA, 21 nt, synthetic construct
  misc_feature 1..21: note = Description of Artificial Sequence: Synthetic oligonucleotide
  source 1..21: mol_type = other RNA
ggttaacaccatttacttcaa

SEQ ID NO: 427 - RNA, 21 nt, synthetic construct
  misc_feature 1..21: note = Description of Artificial Sequence: Synthetic oligonucleotide
  source 1..21: mol_type = other RNA
ggttaacaccatttacttcaa

SEQ ID NO: 428 - RNA, 21 nt, synthetic construct
  misc_feature 1..21: note = Description of Artificial Sequence: Synthetic oligonucleotide
  source 1..21: mol_type = other RNA
ggttaacaccatttacttcaa

SEQ ID NO: 429 - RNA, 21 nt, synthetic construct
  misc_feature 1..21: note = Description of Artificial Sequence: Synthetic oligonucleotide
  source 1..21: mol_type = other RNA
ggttaacaccatttacttcaa

SEQ ID NO: 430 - RNA, 21 nt, synthetic construct
  misc_feature 1..21: note = Description of Artificial Sequence: Synthetic oligonucleotide
  source 1..21: mol_type = other RNA
ggttaacaccatttacttcaa

SEQ ID NO: 431 - RNA, 21 nt, synthetic construct
  misc_feature 1..21: note = Description of Artificial Sequence: Synthetic oligonucleotide
  source 1..21: mol_type = other RNA
ggttaacaccatttacttcaa

SEQ ID NO: 432 - RNA, 21 nt, synthetic construct
  misc_feature 1..21: note = Description of Artificial Sequence: Synthetic oligonucleotide
  source 1..21: mol_type = other RNA
ggttaacaccatttacttcaa

SEQ ID NO: 433 - RNA, 21 nt, synthetic construct
  misc_feature 1..21: note = Description of Artificial Sequence: Synthetic oligonucleotide
  source 1..21: mol_type = other RNA
ggttaacaccatttacttcaa

SEQ ID NO: 434 - RNA, 21 nt, synthetic construct
  misc_feature 1..21: note = Description of Artificial Sequence: Synthetic oligonucleotide
  source 1..21: mol_type = other RNA
ggttaacaccatttacttcaa

SEQ ID NO: 435 - RNA, 21 nt, synthetic construct
  misc_feature 1..21: note = Description of Artificial Sequence: Synthetic oligonucleotide
  source 1..21: mol_type = other RNA
ggttaacaccatttacttcaa

SEQ ID NO: 436 - RNA, 21 nt, synthetic construct
  misc_feature 1..21: note = Description of Artificial Sequence: Synthetic oligonucleotide
  source 1..21: mol_type = other RNA
ggttaacaccatttacttcaa

SEQ ID NO: 437 - RNA, 21 nt, synthetic construct
  misc_feature 1..21: note = Description of Artificial Sequence: Synthetic oligonucleotide
  source 1..21: mol_type = other RNA
ggttaacaccatttacttcaa

SEQ ID NO: 438 - RNA, 21 nt, synthetic construct
  misc_feature 1..21: note = Description of Artificial Sequence: Synthetic oligonucleotide
  source 1..21: mol_type = other RNA
ggttaacaccatttacttcaa

SEQ ID NO: 439 - RNA, 21 nt, synthetic construct
  misc_feature 1..21: note = Description of Artificial Sequence: Synthetic oligonucleotide
  source 1..21: mol_type = other RNA
ggttaacaccatttacttcaa

SEQ ID NO: 440 - RNA, 21 nt, synthetic construct
  misc_feature 1..21: note = Description of Artificial Sequence: Synthetic oligonucleotide
  source 1..21: mol_type = other RNA
ggttaacaccatttacttcaa

SEQ ID NO: 441 - RNA, 21 nt, synthetic construct
  misc_feature 1..21: note = Description of Artificial Sequence: Synthetic oligonucleotide
  source 1..21: mol_type = other RNA
ggttaacaccatttacttcaa

SEQ ID NO: 442 - RNA, 21 nt, synthetic construct
  misc_feature 1..21: note = Description of Artificial Sequence: Synthetic oligonucleotide
  source 1..21: mol_type = other RNA
ggttaacaccatttacttcaa

SEQ ID NO: 443 - RNA, 21 nt, synthetic construct
  misc_feature 1..21: note = Description of Artificial Sequence: Synthetic oligonucleotide
  source 1..21: mol_type = other RNA
ggttaacaccatttacttcaa

SEQ ID NO: 444 - RNA, 21 nt, synthetic construct
  misc_feature 1..21: note = Description of Artificial Sequence: Synthetic oligonucleotide
  source 1..21: mol_type = other RNA
ggttaacaccatttacttcaa

SEQ ID NO: 445 - RNA, 21 nt, synthetic construct
  misc_feature 1..21: note = Description of Artificial Sequence: Synthetic oligonucleotide
  source 1..21: mol_type = other RNA
ggttaacaccatttacttcaa

SEQ ID NO: 446 - RNA, 21 nt, synthetic construct
  misc_feature 1..21: note = Description of Artificial Sequence: Synthetic oligonucleotide
  source 1..21: mol_type = other RNA
ggttaacaccatttacttcaa

SEQ ID NO: 447 - RNA, 21 nt, synthetic construct
  misc_feature 1..21: note = Description of Artificial Sequence: Synthetic oligonucleotide
  source 1..21: mol_type = other RNA
ggttaacaccatttacttcaa

SEQ ID NO: 448 - RNA, 21 nt, synthetic construct
  misc_feature 1..21: note = Description of Artificial Sequence: Synthetic oligonucleotide
  source 1..21: mol_type = other RNA
ggttaacaccatttacttcaa

SEQ ID NO: 449 - RNA, 21 nt, synthetic construct
  misc_feature 1..21: note = Description of Artificial Sequence: Synthetic oligonucleotide
  source 1..21: mol_type = other RNA
ggttaacaccatttacttcaa

SEQ ID NO: 450 - RNA, 21 nt, synthetic construct
  misc_feature 1..21: note = Description of Artificial Sequence: Synthetic oligonucleotide
  source 1..21: mol_type = other RNA
ggttaacaccatttacttcaa

SEQ ID NO: 451 - RNA, 21 nt, synthetic construct
  misc_feature 1..21: note = Description of Artificial Sequence: Synthetic oligonucleotide
  source 1..21: mol_type = other RNA
ggttaacaccatttacttcaa

SEQ ID NO: 452 - RNA, 21 nt, synthetic construct
  misc_feature 1..21: note = Description of Artificial Sequence: Synthetic oligonucleotide
  source 1..21: mol_type = other RNA
ggttaacaccatttacttcaa

SEQ ID NO: 453 - RNA, 21 nt, synthetic construct
  misc_feature 1..21: note = Description of Artificial Sequence: Synthetic oligonucleotide
  source 1..21: mol_type = other RNA
ggttaacaccatttacttcaa

SEQ ID NO: 454 - RNA, 21 nt, synthetic construct
  misc_feature 1..21: note = Description of Artificial Sequence: Synthetic oligonucleotide
  source 1..21: mol_type = other RNA
ggttaacaccatttacttcaa

SEQ ID NO: 455 - RNA, 21 nt, synthetic construct
  misc_feature 1..21: note = Description of Artificial Sequence: Synthetic oligonucleotide
  source 1..21: mol_type = other RNA
ggttaacaccatttacttcaa

SEQ ID NO: 456 - RNA, 21 nt, synthetic construct
  misc_feature 1..21: note = Description of Artificial Sequence: Synthetic oligonucleotide
  source 1..21: mol_type = other RNA
ggttaacaccatttacttcaa

SEQ ID NO: 457 - RNA, 21 nt, synthetic construct
  misc_feature 1..21: note = Description of Artificial Sequence: Synthetic oligonucleotide
  source 1..21: mol_type = other RNA
ggttaacaccatttacttcaa

SEQ ID NO: 458 - RNA, 21 nt, synthetic construct
  misc_feature 1..21: note = Description of Artificial Sequence: Synthetic oligonucleotide
  source 1..21: mol_type = other RNA
ggttaacaccatttacttcaa

SEQ ID NO: 459 - RNA, 21 nt, synthetic construct
  misc_feature 1..21: note = Description of Artificial Sequence: Synthetic oligonucleotide
  source 1..21: mol_type = other RNA
ggttaacaccatttacttcaa

SEQ ID NO: 460 - RNA, 21 nt, synthetic construct
  misc_feature 1..21: note = Description of Artificial Sequence: Synthetic oligonucleotide
  source 1..21: mol_type = other RNA
ggttaacaccatttacttcaa

SEQ ID NO: 461 - RNA, 21 nt, synthetic construct
  misc_feature 1..21: note = Description of Artificial Sequence: Synthetic oligonucleotide
  source 1..21: mol_type = other RNA
ggttaacaccatttacttcaa

SEQ ID NO: 462 - RNA, 21 nt, synthetic construct
  misc_feature 1..21: note = Description of Artificial Sequence: Synthetic oligonucleotide
  source 1..21: mol_type = other RNA
ggttaacaccatttacttcaa

SEQ ID NO: 463 - RNA, 21 nt, synthetic construct
  misc_feature 1..21: note = Description of Artificial Sequence: Synthetic oligonucleotide
  source 1..21: mol_type = other RNA
ggttaacaccatttacttcaa

SEQ ID NO: 464 - RNA, 21 nt, synthetic construct
  misc_feature 1..21: note = Description of Artificial Sequence: Synthetic oligonucleotide
  source 1..21: mol_type = other RNA
ggttaacaccatttacttcaa

SEQ ID NO: 465 - RNA, 21 nt, synthetic construct
  misc_feature 1..21: note = Description of Artificial Sequence: Synthetic oligonucleotide
  source 1..21: mol_type = other RNA
ggttaacaccatttacttcaa

SEQ ID NO: 466 - RNA, 21 nt, synthetic construct
  misc_feature 1..21: note = Description of Artificial Sequence: Synthetic oligonucleotide
  source 1..21: mol_type = other RNA
ggttaacaccatttacttcaa

SEQ ID NO: 467 - RNA, 21 nt, synthetic construct
  misc_feature 1..21: note = Description of Artificial Sequence: Synthetic oligonucleotide
  source 1..21: mol_type = other RNA
ggttaacaccatttacttcaa

SEQ ID NO: 468 - RNA, 21 nt, synthetic construct
  misc_feature 1..21: note = Description of Artificial Sequence: Synthetic oligonucleotide
  source 1..21: mol_type = other RNA
ggttaacaccatttacttcaa

SEQ ID NO: 469 - RNA, 21 nt, synthetic construct
  misc_feature 1..21: note = Description of Artificial Sequence: Synthetic oligonucleotide
  source 1..21: mol_type = other RNA
ggttaacaccatttacttcaa

SEQ ID NO: 470 - RNA, 21 nt, synthetic construct
  misc_feature 1..21: note = Description of Artificial Sequence: Synthetic oligonucleotide
  source 1..21: mol_type = other RNA
ggttaacaccatttacttcaa

SEQ ID NO: 471 - RNA, 21 nt, synthetic construct
  misc_feature 1..21: note = Description of Artificial Sequence: Synthetic oligonucleotide
  source 1..21: mol_type = other RNA
ggttaacaccatttacttcaa

SEQ ID NO: 472 - RNA, 21 nt, synthetic construct
  misc_feature 1..21: note = Description of Artificial Sequence: Synthetic oligonucleotide
  source 1..21: mol_type = other RNA
ggttaacaccatttacttcaa

SEQ ID NO: 473 - RNA, 21 nt, synthetic construct
  misc_feature 1..21: note = Description of Artificial Sequence: Synthetic oligonucleotide
  source 1..21: mol_type = other RNA
ggttaacaccatttacttcaa

SEQ ID NO: 474 - RNA, 21 nt, synthetic construct
  misc_feature 1..21: note = Description of Artificial Sequence: Synthetic oligonucleotide
  source 1..21: mol_type = other RNA
ggttaacaccatttacttcaa

SEQ ID NO: 475 - RNA, 21 nt, synthetic construct
  misc_feature 1..21: note = Description of Artificial Sequence: Synthetic oligonucleotide
  source 1..21: mol_type = other RNA
ggttaacatcatttacttcaa

SEQ ID NO: 476 - RNA, 21 nt, synthetic construct
  misc_feature 1..21: note = Description of Artificial Sequence: Synthetic oligonucleotide
  source 1..21: mol_type = other RNA
ggttaacaacatttacttcaa

SEQ ID NO: 477 - RNA, 21 nt, synthetic construct
  misc_feature 1..21: note = Description of Artificial Sequence: Synthetic oligonucleotide
  source 1..21: mol_type = other RNA
ggttaacactatttacttcaa

SEQ ID NO: 478 - RNA, 21 nt, synthetic construct
  misc_feature 1..21: note = Description of Artificial Sequence: Synthetic oligonucleotide
  source 1..21: mol_type = other RNA
ggttaacacaatttacttcaa

SEQ ID NO: 479 - RNA, 21 nt, synthetic construct
  misc_feature 1..21: note = Description of Artificial Sequence: Synthetic oligonucleotide
  source 1..21: mol_type = other RNA
ggttaacaccatttacttcaa

SEQ ID NO: 480 - RNA, 21 nt, synthetic construct
  misc_feature 1..21: note = Description of Artificial Sequence: Synthetic oligonucleotide
  source 1..21: mol_type = other RNA
ggttaacaccatttacttcaa

SEQ ID NO: 481 - RNA, 21 nt, synthetic construct
  misc_feature 1..21: note = Description of Artificial Sequence: Synthetic oligonucleotide
  source 1..21: mol_type = other RNA
ggttaacaccatttacttcaa

SEQ ID NO: 482 - RNA, 21 nt, synthetic construct
  misc_feature 1..21: note = Description of Artificial Sequence: Synthetic oligonucleotide
  source 1..21: mol_type = other RNA
ggttaacaccatttacttcaa

SEQ ID NO: 483 - RNA, 19 nt, synthetic construct
  misc_feature 1..19: note = Description of Artificial Sequence: Synthetic oligonucleotide
  source 1..19: mol_type = other RNA
ttaacaccatttacttcaa

SEQ ID NO: 484 - RNA, 19 nt, synthetic construct
  misc_feature 1..19: note = Description of Artificial Sequence: Synthetic oligonucleotide
  source 1..19: mol_type = other RNA
ttaacaccatttacttcaa

SEQ ID NO: 485 - RNA, 19 nt, synthetic construct
  misc_feature 1..19: note = Description of Artificial Sequence: Synthetic oligonucleotide
  source 1..19: mol_type = other RNA
ttaacaccatttacttcaa

SEQ ID NO: 486 - RNA, 19 nt, synthetic construct
  misc_feature 1..19: note = Description of Artificial Sequence: Synthetic oligonucleotide
  source 1..19: mol_type = other RNA
ttaacaccatttacttcaa

SEQ ID NO: 487 - RNA, 17 nt, synthetic construct
  misc_feature 1..17: note = Description of Artificial Sequence: Synthetic oligonucleotide
  source 1..17: mol_type = other RNA
aacaccatttacttcaa

SEQ ID NO: 488 - RNA, 17 nt, synthetic construct
  misc_feature 1..17: note = Description of Artificial Sequence: Synthetic oligonucleotide
  source 1..17: mol_type = other RNA
aacaccatttacttcaa

SEQ ID NO: 489 - RNA, 21 nt, synthetic construct
  misc_feature 1..21: note = Description of Artificial Sequence: Synthetic oligonucleotide
  source 1..21: mol_type = other RNA
ggttaacaccatttacttcaa

SEQ ID NO: 490 - RNA, 21 nt, synthetic construct
  misc_feature 1..21: note = Description of Artificial Sequence: Synthetic oligonucleotide
  source 1..21: mol_type = other RNA
ggttaacaccatttacttcaa

SEQ ID NO: 491 - RNA, 21 nt, synthetic construct
  misc_feature 1..21: note = Description of Artificial Sequence: Synthetic oligonucleotide
  source 1..21: mol_type = other RNA
ggttaacaccatttacttcaa

SEQ ID NO: 492 - RNA, 21 nt, synthetic construct
  misc_feature 1..21: note = Description of Artificial Sequence: Synthetic oligonucleotide
  source 1..21: mol_type = other RNA
ggttaacaccatttacttcaa

SEQ ID NO: 493 - RNA, 21 nt, synthetic construct
  misc_feature 1..21: note = Description of Artificial Sequence: Synthetic oligonucleotide
  source 1..21: mol_type = other RNA
ggttaacaccatttacttcaa

SEQ ID NO: 494 - RNA, 21 nt, synthetic construct
  misc_feature 1..21: note = Description of Artificial Sequence: Synthetic oligonucleotide
  source 1..21: mol_type = other RNA
ggttaacaccatttacttcaa

SEQ ID NO: 495 - RNA, 21 nt, synthetic construct
  misc_feature 1..21: note = Description of Artificial Sequence: Synthetic oligonucleotide
  source 1..21: mol_type = other RNA
ggttaacaccatttacttcaa

SEQ ID NO: 496 - RNA, 21 nt, synthetic construct
  misc_feature 1..21: note = Description of Artificial Sequence: Synthetic oligonucleotide
  source 1..21: mol_type = other RNA
ggttaacaccatttacttcaa

SEQ ID NO: 497 - RNA, 21 nt, synthetic construct
  misc_feature 1..21: note = Description of Artificial Sequence: Synthetic oligonucleotide
  source 1..21: mol_type = other RNA
ggttaacaccatttacttcaa

SEQ ID NO: 498 - RNA, 21 nt, synthetic construct
  misc_feature 1..21: note = Description of Artificial Sequence: Synthetic oligonucleotide
  source 1..21: mol_type = other RNA
ggttaacaccatttacttcaa

SEQ ID NO: 499 - RNA, 21 nt, synthetic construct
  misc_feature 1..21: note = Description of Artificial Sequence: Synthetic oligonucleotide
  source 1..21: mol_type = other RNA
ggttaacaccatttacttcaa

SEQ ID NO: 500 - RNA, 21 nt, synthetic construct
  misc_feature 1..21: note = Description of Artificial Sequence: Synthetic oligonucleotide
  source 1..21: mol_type = other RNA
ggttaacaccatttacttcaa

SEQ ID NO: 501 - RNA, 21 nt, synthetic construct
  misc_feature 1..21: note = Description of Artificial Sequence: Synthetic oligonucleotide
  source 1..21: mol_type = other RNA
ggttaacaccatttacttcaa

SEQ ID NO: 502 - RNA, 21 nt, synthetic construct
  misc_feature 1..21: note = Description of Artificial Sequence: Synthetic oligonucleotide
  source 1..21: mol_type = other RNA
ggttaacaccatttacttcaa

SEQ ID NO: 503 - RNA, 21 nt, synthetic construct
  misc_feature 1..21: note = Description of Artificial Sequence: Synthetic oligonucleotide
  source 1..21: mol_type = other RNA
ggttaacaccatttacttcaa

SEQ ID NO: 504 - RNA, 21 nt, synthetic construct
  modified_base 18: mod_base = OTHER; note = thymine
  misc_feature 1..21: note = Description of Artificial Sequence: Synthetic oligonucleotide
  misc_feature 1..21: note = Description of Combined DNA/RNA Molecule: Synthetic oligonucleotide
  source 1..21: mol_type = other RNA
ggttaacaccatttacttcaa

SEQ ID NO: 505 - RNA, 21 nt, synthetic construct
  modified_base 18: mod_base = OTHER; note = thymine
  misc_feature 1..21: note = Description of Artificial Sequence: Synthetic oligonucleotide
  misc_feature 1..21: note = Description of Combined DNA/RNA Molecule: Synthetic oligonucleotide
  source 1..21: mol_type = other RNA
ggttaacaccatttacttcaa

SEQ ID NO: 506 - RNA, 21 nt, synthetic construct
  modified_base 4: mod_base = OTHER; note = thymine
  modified_base 18: mod_base = OTHER; note = thymine
  misc_feature 1..21: note = Description of Artificial Sequence: Synthetic oligonucleotide
  misc_feature 1..21: note = Description of Combined DNA/RNA Molecule: Synthetic oligonucleotide
  source 1..21: mol_type = other RNA
ggttaacaccatttacttcaa

SEQ ID NO: 507 - RNA, 21 nt, synthetic construct
  modified_base 4: mod_base = OTHER; note = thymine
  modified_base 18: mod_base = OTHER; note = thymine
  misc_feature 1..21: note = Description of Artificial Sequence: Synthetic oligonucleotide
  misc_feature 1..21: note = Description of Combined DNA/RNA Molecule: Synthetic oligonucleotide
  source 1..21: mol_type = other RNA
ggttaacaccatttacttcaa

SEQ ID NO: 508 - RNA, 21 nt, synthetic construct
  modified_base 4: mod_base = OTHER; note = thymine
  modified_base 14: mod_base = OTHER; note = thymine
  modified_base 18: mod_base = OTHER; note = thymine
  misc_feature 1..21: note = Description of Artificial Sequence: Synthetic oligonucleotide
  misc_feature 1..21: note = Description of Combined DNA/RNA Molecule: Synthetic oligonucleotide
  source 1..21: mol_type = other RNA
ggttaacaccatttacttcaa

SEQ ID NO: 509 - RNA, 21 nt, synthetic construct
  modified_base 4: mod_base = OTHER; note = thymine
  modified_base 12: mod_base = OTHER; note = thymine
  modified_base 14: mod_base = OTHER; note = thymine
  modified_base 18: mod_base = OTHER; note = thymine
  misc_feature 1..21: note = Description of Artificial Sequence: Synthetic oligonucleotide
  misc_feature 1..21: note = Description of Combined DNA/RNA Molecule: Synthetic oligonucleotide
  source 1..21: mol_type = other RNA
ggttaacaccatttacttcaa

SEQ ID NO: 510 - RNA, 21 nt, synthetic construct
  modified_base 4: mod_base = OTHER; note = thymine
  modified_base 12: mod_base = OTHER; note = thymine
  modified_base 14: mod_base = OTHER; note = thymine
  modified_base 18: mod_base = OTHER; note = thymine
  misc_feature 1..21: note = Description of Artificial Sequence: Synthetic oligonucleotide
  misc_feature 1..21: note = Description of Combined DNA/RNA Molecule: Synthetic oligonucleotide
  source 1..21: mol_type = other RNA
ggttaacaccatttacttcaa

SEQ ID NO: 511 - RNA, 21 nt, synthetic construct
  modified_base 20..21: mod_base = OTHER; note = thymine
  misc_feature 1..21: note = Description of Artificial Sequence: Synthetic oligonucleotide
  misc_feature 1..21: note = Description of Combined DNA/RNA Molecule: Synthetic oligonucleotide
  source 1..21: mol_type = other RNA
tttgttggcttttcgatagtt

SEQ ID NO: 512 - RNA, 21 nt, synthetic construct
  modified_base 20..21: mod_base = OTHER; note = thymine
  misc_feature 1..21: note = Description of Artificial Sequence: Synthetic oligonucleotide
  misc_feature 1..21: note = Description of Combined DNA/RNA Molecule: Synthetic oligonucleotide
  source 1..21: mol_type = other RNA
tttgttggcttttcgatagtt

SEQ ID NO: 513 - RNA, 21 nt, synthetic construct
  modified_base 20..21: mod_base = OTHER; note = thymine
  misc_feature 1..21: note = Description of Artificial Sequence: Synthetic oligonucleotide
  misc_feature 1..21: note = Description of Combined DNA/RNA Molecule: Synthetic oligonucleotide
  source 1..21: mol_type = other RNA
tttgttggcttttcgatagtt

SEQ ID NO: 514 - RNA, 21 nt, synthetic construct
  modified_base 20..21: mod_base = OTHER; note = thymine
  misc_feature 1..21: note = Description of Artificial Sequence: Synthetic oligonucleotide
  misc_feature 1..21: note = Description of Combined DNA/RNA Molecule: Synthetic oligonucleotide
  source 1..21: mol_type = other RNA
tttgttggcttttcgatagtt

SEQ ID NO: 515 - RNA, 21 nt, synthetic construct
  modified_base 20..21: mod_base = OTHER; note = thymine
  misc_feature 1..21: note = Description of Artificial Sequence: Synthetic oligonucleotide
  misc_feature 1..21: note = Description of Combined DNA/RNA Molecule: Synthetic oligonucleotide
  source 1..21: mol_type = other RNA
tttgttggcttttcgatagtt

SEQ ID NO: 516 - RNA, 21 nt, synthetic construct
  modified_base 20..21: mod_base = OTHER; note = thymine
  misc_feature 1..21: note = Description of Artificial Sequence: Synthetic oligonucleotide
  misc_feature 1..21: note = Description of Combined DNA/RNA Molecule: Synthetic oligonucleotide
  source 1..21: mol_type = other RNA
tttgttggcttttcgatagtt

SEQ ID NO: 517 - RNA, 21 nt, synthetic construct
  modified_base 20..21: mod_base = OTHER; note = thymine
  misc_feature 1..21: note = Description of Artificial Sequence: Synthetic oligonucleotide
  misc_feature 1..21: note = Description of Combined DNA/RNA Molecule: Synthetic oligonucleotide
  source 1..21: mol_type = other RNA
tttgttggcttttcgatagtt

SEQ ID NO: 518 - RNA, 21 nt, synthetic construct
  modified_base 20..21: mod_base = OTHER; note = thymine
  misc_feature 1..21: note = Description of Artificial Sequence: Synthetic oligonucleotide
  misc_feature 1..21: note = Description of Combined DNA/RNA Molecule: Synthetic oligonucleotide
  source 1..21: mol_type = other RNA
tttgttggcttttcgatagtt

SEQ ID NO: 519 - RNA, 21 nt, synthetic construct
  modified_base 20..21: mod_base = OTHER; note = thymine
  misc_feature 1..21: note = Description of Artificial Sequence: Synthetic oligonucleotide
  misc_feature 1..21: note = Description of Combined DNA/RNA Molecule: Synthetic oligonucleotide
  source 1..21: mol_type = other RNA
tttgttggcttttcgatagtt

SEQ ID NO: 520 - RNA, 21 nt, synthetic construct
  modified_base 20..21: mod_base = OTHER; note = thymine
  misc_feature 1..21: note = Description of Artificial Sequence: Synthetic oligonucleotide
  misc_feature 1..21: note = Description of Combined DNA/RNA Molecule: Synthetic oligonucleotide
  source 1..21: mol_type = other RNA
tttgttggcttttcgatagtt

SEQ ID NO: 521 - RNA, 21 nt, synthetic construct
  modified_base 20..21: mod_base = OTHER; note = thymine
  misc_feature 1..21: note = Description of Artificial Sequence: Synthetic oligonucleotide
  misc_feature 1..21: note = Description of Combined DNA/RNA Molecule: Synthetic oligonucleotide
  source 1..21: mol_type = other RNA
tttgttggcttttcgatagtt

SEQ ID NO: 522 - RNA, 21 nt, synthetic construct
  modified_base 20..21: mod_base = OTHER; note = thymine
  misc_feature 1..21: note = Description of Artificial Sequence: Synthetic oligonucleotide
  misc_feature 1..21: note = Description of Combined DNA/RNA Molecule: Synthetic oligonucleotide
  source 1..21: mol_type = other RNA
tttgttggcttttcgatagtt

SEQ ID NO: 523 - RNA, 21 nt, synthetic construct
  modified_base 20..21: mod_base = OTHER; note = thymine
  misc_feature 1..21: note = Description of Artificial Sequence: Synthetic oligonucleotide
  misc_feature 1..21: note = Description of Combined DNA/RNA Molecule: Synthetic oligonucleotide
  source 1..21: mol_type = other RNA
tttgttggcttttcgatagtt

SEQ ID NO: 524 - RNA, 21 nt, synthetic construct
  modified_base 20..21: mod_base = OTHER; note = thymine
  misc_feature 1..21: note = Description of Artificial Sequence: Synthetic oligonucleotide
  misc_feature 1..21: note = Description of Combined DNA/RNA Molecule: Synthetic oligonucleotide
  source 1..21: mol_type = other RNA
atgcacatgggattcatggtt

SEQ ID NO: 525 - RNA, 21 nt, synthetic construct
  modified_base 20..21: mod_base = OTHER; note = thymine
  misc_feature 1..21: note = Description of Artificial Sequence: Synthetic oligonucleotide
  misc_feature 1..21: note = Description of Combined DNA/RNA Molecule: Synthetic oligonucleotide
  source 1..21: mol_type = other RNA
atgcacatgggattcatggtt

SEQ ID NO: 526 - RNA, 21 nt, synthetic construct
  modified_base 20..21: mod_base = OTHER; note = thymine
  misc_feature 1..21: note = Description of Artificial Sequence: Synthetic oligonucleotide
  misc_feature 1..21: note = Description of Combined DNA/RNA Molecule: Synthetic oligonucleotide
  source 1..21: mol_type = other RNA
atgcacatgggattcatggtt

SEQ ID NO: 527 - RNA, 21 nt, synthetic construct
  modified_base 20..21: mod_base = OTHER; note = thymine
  misc_feature 1..21: note = Description of Artificial Sequence: Synthetic oligonucleotide
  misc_feature 1..21: note = Description of Combined DNA/RNA Molecule: Synthetic oligonucleotide
  source 1..21: mol_type = other RNA
atgcacatgggattcatggtt

SEQ ID NO: 528 - RNA, 21 nt, synthetic construct
  modified_base 20..21: mod_base = OTHER; note = thymine
  misc_feature 1..21: note = Description of Artificial Sequence: Synthetic oligonucleotide
  misc_feature 1..21: note = Description of Combined DNA/RNA Molecule: Synthetic oligonucleotide
  source 1..21: mol_type = other RNA
atgcacatgggattcatggtt

SEQ ID NO: 529 - RNA, 21 nt, synthetic construct
  modified_base 20..21: mod_base = OTHER; note = thymine
  misc_feature 1..21: note = Description of Artificial Sequence: Synthetic oligonucleotide
  misc_feature 1..21: note = Description of Combined DNA/RNA Molecule: Synthetic oligonucleotide
  source 1..21: mol_type = other RNA
atgcacatgggattcatggtt

SEQ ID NO: 530 - RNA, 21 nt, synthetic construct
  modified_base 20..21: mod_base = OTHER; note = thymine
  misc_feature 1..21: note = Description of Artificial Sequence: Synthetic oligonucleotide
  misc_feature 1..21: note = Description of Combined DNA/RNA Molecule: Synthetic oligonucleotide
  source 1..21: mol_type = other RNA
atgcacatgggattcatggtt

SEQ ID NO: 531 - RNA, 21 nt, synthetic construct
  modified_base 20..21: mod_base = OTHER; note = thymine
  misc_feature 1..21: note = Description of Artificial Sequence: Synthetic oligonucleotide
  misc_feature 1..21: note = Description of Combined DNA/RNA Molecule: Synthetic oligonucleotide
  source 1..21: mol_type = other RNA
atgcacatgggattcatggtt

SEQ ID NO: 532 - RNA, 21 nt, synthetic construct
  modified_base 20..21: mod_base = OTHER; note = thymine
  misc_feature 1..21: note = Description of Artificial Sequence: Synthetic oligonucleotide
  misc_feature 1..21: note = Description of Combined DNA/RNA Molecule: Synthetic oligonucleotide
  source 1..21: mol_type = other RNA
atgcacatgggattcatggtt

SEQ ID NO: 533 - RNA, 21 nt, synthetic construct
  modified_base 20..21: mod_base = OTHER; note = thymine
  misc_feature 1..21: note = Description of Artificial Sequence: Synthetic oligonucleotide
  misc_feature 1..21: note = Description of Combined DNA/RNA Molecule: Synthetic oligonucleotide
  source 1..21: mol_type = other RNA
atgcacatgggattcatggtt

SEQ ID NO: 534 - RNA, 21 nt, synthetic construct
  modified_base 20..21: mod_base = OTHER; note = thymine
  misc_feature 1..21: note = Description of Artificial Sequence: Synthetic oligonucleotide
  misc_feature 1..21: note = Description of Combined DNA/RNA Molecule: Synthetic oligonucleotide
  source 1..21: mol_type = other RNA
atgcacatgggattcatggtt

SEQ ID NO: 535 - RNA, 21 nt, synthetic construct
  modified_base 20..21: mod_base = OTHER; note = thymine
  misc_feature 1..21: note = Description of Artificial Sequence: Synthetic oligonucleotide
  misc_feature 1..21: note = Description of Combined DNA/RNA Molecule: Synthetic oligonucleotide
  source 1..21: mol_type = other RNA
atgcacatgggattcatggtt

SEQ ID NO: 536 - RNA, 21 nt, synthetic construct
  modified_base 20..21: mod_base = OTHER; note = thymine
  misc_feature 1..21: note = Description of Artificial Sequence: Synthetic oligonucleotide
  misc_feature 1..21: note = Description of Combined DNA/RNA Molecule: Synthetic oligonucleotide
  source 1..21: mol_type = other RNA
atgcacatgggattcatggtt

SEQ ID NO: 537 - RNA, 21 nt, synthetic construct
  modified_base 20..21: mod_base = OTHER; note = thymine
  misc_feature 1..21: note = Description of Artificial Sequence: Synthetic oligonucleotide
  misc_feature 1..21: note = Description of Combined DNA/RNA Molecule: Synthetic oligonucleotide
  source 1..21: mol_type = other RNA
ttttcgatagagtcggcagtt

SEQ ID NO: 538 - RNA, 21 nt, synthetic construct
  modified_base 20..21: mod_base = OTHER; note = thymine
  misc_feature 1..21: note = Description of Artificial Sequence: Synthetic oligonucleotide
  misc_feature 1..21: note = Description of Combined DNA/RNA Molecule: Synthetic oligonucleotide
  source 1..21: mol_type = other RNA
ttttcgatagagtcggcagtt

SEQ ID NO: 539 - RNA, 21 nt, synthetic construct
  modified_base 20..21: mod_base = OTHER; note = thymine
  misc_feature 1..21: note = Description of Artificial Sequence: Synthetic oligonucleotide
  misc_feature 1..21: note = Description of Combined DNA/RNA Molecule: Synthetic oligonucleotide
  source 1..21: mol_type = other RNA
ttttcgatagagtcggcagtt

SEQ ID NO: 540 - RNA, 21 nt, synthetic construct
  modified_base 20..21: mod_base = OTHER; note = thymine
  misc_feature 1..21: note = Description of Artificial Sequence: Synthetic oligonucleotide
  misc_feature 1..21: note = Description of Combined DNA/RNA Molecule: Synthetic oligonucleotide
  source 1..21: mol_type = other RNA
ttttcgatagagtcggcagtt

SEQ ID NO: 541 - RNA, 21 nt, synthetic construct
  modified_base 20..21: mod_base = OTHER; note = thymine
  misc_feature 1..21: note = Description of Artificial Sequence: Synthetic oligonucleotide
  misc_feature 1..21: note = Description of Combined DNA/RNA Molecule: Synthetic oligonucleotide
  source 1..21: mol_type = other RNA
ttttcgatagagtcggcagtt

SEQ ID NO: 542 - RNA, 21 nt, synthetic construct
  modified_base 20..21: mod_base = OTHER; note = thymine
  misc_feature 1..21: note = Description of Artificial Sequence: Synthetic oligonucleotide
  misc_feature 1..21: note = Description of Combined DNA/RNA Molecule: Synthetic oligonucleotide
  source 1..21: mol_type = other RNA
ttttcgatagagtcggcagtt

SEQ ID NO: 543 - RNA, 21 nt, synthetic construct
  modified_base 20..21: mod_base = OTHER; note = thymine
  misc_feature 1..21: note = Description of Artificial Sequence: Synthetic oligonucleotide
  misc_feature 1..21: note = Description of Combined DNA/RNA Molecule: Synthetic oligonucleotide
  source 1..21: mol_type = other RNA
ttttcgatagagtcggcagtt

SEQ ID NO: 544 - RNA, 21 nt, synthetic construct
  modified_base 20..21: mod_base = OTHER; note = thymine
  misc_feature 1..21: note = Description of Artificial Sequence: Synthetic oligonucleotide
  misc_feature 1..21: note = Description of Combined DNA/RNA Molecule: Synthetic oligonucleotide
  source 1..21: mol_type = other RNA
ttttcgatagagtcggcagtt

SEQ ID NO: 545 - RNA, 21 nt, synthetic construct
  modified_base 20..21: mod_base = OTHER; note = thymine
  misc_feature 1..21: note = Description of Artificial Sequence: Synthetic oligonucleotide
  misc_feature 1..21: note = Description of Combined DNA/RNA Molecule: Synthetic oligonucleotide
  source 1..21: mol_type = other RNA
ttttcgatagagtcggcagtt

SEQ ID NO: 546 - RNA, 21 nt, synthetic construct
  modified_base 20..21: mod_base = OTHER; note = thymine
  misc_feature 1..21: note = Description of Artificial Sequence: Synthetic oligonucleotide
  misc_feature 1..21: note = Description of Combined DNA/RNA Molecule: Synthetic oligonucleotide
  source 1..21: mol_type = other RNA
ttttcgatagagtcggcagtt

SEQ ID NO: 547 - RNA, 21 nt, synthetic construct
  modified_base 20..21: mod_base = OTHER; note = thymine
  misc_feature 1..21: note = Description of Artificial Sequence: Synthetic oligonucleotide
  misc_feature 1..21: note = Description of Combined DNA/RNA Molecule: Synthetic oligonucleotide
  source 1..21: mol_type = other RNA
ttttcgatagagtcggcagtt

SEQ ID NO: 548 - RNA, 21 nt, synthetic construct
  modified_base 20..21: mod_base = OTHER; note = thymine
  misc_feature 1..21: note = Description of Artificial Sequence: Synthetic oligonucleotide
  misc_feature 1..21: note = Description of Combined DNA/RNA Molecule: Synthetic oligonucleotide
  source 1..21: mol_type = other RNA
ttttcgatagagtcggcagtt

SEQ ID NO: 549 - RNA, 21 nt, synthetic construct
  modified_base 20..21: mod_base = OTHER; note = thymine
  misc_feature 1..21: note = Description of Artificial Sequence: Synthetic oligonucleotide
  misc_feature 1..21: note = Description of Combined DNA/RNA Molecule: Synthetic oligonucleotide
  source 1..21: mol_type = other RNA
ttttcgatagagtcggcagtt

SEQ ID NO: 550 - RNA, 21 nt, synthetic construct
  modified_base 20..21: mod_base = OTHER; note = thymine
  misc_feature 1..21: note = Description of Artificial Sequence: Synthetic oligonucleotide
  misc_feature 1..21: note = Description of Combined DNA/RNA Molecule: Synthetic oligonucleotide
  source 1..21: mol_type = other RNA
ttcagtttggcaaagaagatt

SEQ ID NO: 551 - RNA, 21 nt, synthetic construct
  modified_base 20..21: mod_base = OTHER; note = thymine
  misc_feature 1..21: note = Description of Artificial Sequence: Synthetic oligonucleotide
  misc_feature 1..21: note = Description of Combined DNA/RNA Molecule: Synthetic oligonucleotide
  source 1..21: mol_type = other RNA
ttcagtttggcaaagaagatt

SEQ ID NO: 552 - RNA, 21 nt, synthetic construct
  modified_base 20..21: mod_base = OTHER; note = thymine
  misc_feature 1..21: note = Description of Artificial Sequence: Synthetic oligonucleotide
  misc_feature 1..21: note = Description of Combined DNA/RNA Molecule: Synthetic oligonucleotide
  source 1..21: mol_type = other RNA
ttcagtttggcaaagaagatt

SEQ ID NO: 553 - RNA, 21 nt, synthetic construct
  modified_base 20..21: mod_base = OTHER; note = thymine
  misc_feature 1..21: note = Description of Artificial Sequence: Synthetic oligonucleotide
  misc_feature 1..21: note = Description of Combined DNA/RNA Molecule: Synthetic oligonucleotide
  source 1..21: mol_type = other RNA
ttcagtttggcaaagaagatt

SEQ ID NO: 554 - RNA, 21 nt, synthetic construct
  modified_base 20..21: mod_base = OTHER; note = thymine
  misc_feature 1..21: note = Description of Artificial Sequence: Synthetic oligonucleotide
  misc_feature 1..21: note = Description of Combined DNA/RNA Molecule: Synthetic oligonucleotide
  source 1..21: mol_type = other RNA
ttcagtttggcaaagaagatt

SEQ ID NO: 555 - RNA, 21 nt, synthetic construct
  modified_base 20..21: mod_base = OTHER; note = thymine
  misc_feature 1..21: note = Description of Artificial Sequence: Synthetic oligonucleotide
  misc_feature 1..21: note = Description of Combined DNA/RNA Molecule: Synthetic oligonucleotide
  source 1..21: mol_type = other RNA
ttcagtttggcaaagaagatt

SEQ ID NO: 556 - RNA, 21 nt, synthetic construct
  modified_base 20..21: mod_base = OTHER; note = thymine
  misc_feature 1..21: note = Description of Artificial Sequence: Synthetic oligonucleotide
  misc_feature 1..21: note = Description of Combined DNA/RNA Molecule: Synthetic oligonucleotide
  source 1..21: mol_type = other RNA
ttcagtttggcaaagaagatt

SEQ ID NO: 557 - RNA, 21 nt, synthetic construct
  modified_base 20..21: mod_base = OTHER; note = thymine
  misc_feature 1..21: note = Description of Artificial Sequence: Synthetic oligonucleotide
  misc_feature 1..21: note = Description of Combined DNA/RNA Molecule: Synthetic oligonucleotide
  source 1..21: mol_type = other RNA
ttcagtttggcaaagaagatt

SEQ ID NO: 558 - RNA, 21 nt, synthetic construct
  modified_base 20..21: mod_base = OTHER; note = thymine
  misc_feature 1..21: note = Description of Artificial Sequence: Synthetic oligonucleotide
  misc_feature 1..21: note = Description of Combined DNA/RNA Molecule: Synthetic oligonucleotide
  source 1..21: mol_type = other RNA
ttcagtttggcaaagaagatt

SEQ ID NO: 559 - RNA, 21 nt, synthetic construct
  modified_base 20..21: mod_base = OTHER; note = thymine
  misc_feature 1..21: note = Description of Artificial Sequence: Synthetic oligonucleotide
  misc_feature 1..21: note = Description of Combined DNA/RNA Molecule: Synthetic oligonucleotide
  source 1..21: mol_type = other RNA
ttcagtttggcaaagaagatt

SEQ ID NO: 560 - RNA, 21 nt, synthetic construct
  modified_base 20..21: mod_base = OTHER; note = thymine
  misc_feature 1..21: note = Description of Artificial Sequence: Synthetic oligonucleotide
  misc_feature 1..21: note = Description of Combined DNA/RNA Molecule: Synthetic oligonucleotide
  source 1..21: mol_type = other RNA
ttcagtttggcaaagaagatt

SEQ ID NO: 561 - RNA, 21 nt, synthetic construct
  modified_base 20..21: mod_base = OTHER; note = thymine
  misc_feature 1..21: note = Description of Artificial Sequence: Synthetic oligonucleotide
  misc_feature 1..21: note = Description of Combined DNA/RNA Molecule: Synthetic oligonucleotide
  source 1..21: mol_type = other RNA
ttcagtttggcaaagaagatt

SEQ ID NO: 562 - RNA, 23 nt, synthetic construct
  misc_feature 1..23: note = Description of Artificial Sequence: Synthetic oligonucleotide
  source 1..23: mol_type = other RNA
ttgaagtaaatggtgttaaccag

SEQ ID NO: 563 - RNA, 23 nt, synthetic construct
  misc_feature 1..23: note = Description of Artificial Sequence: Synthetic oligonucleotide
  source 1..23: mol_type = other RNA
aaaggcgattggctgatactaac

SEQ ID NO: 564 - RNA, 23 nt, synthetic construct
  misc_feature 1..23: note = Description of Artificial Sequence: Synthetic oligonucleotide
  source 1..23: mol_type = other RNA
atagaaagtggtagcaaagcggg

SEQ ID NO: 565 - RNA, 23 nt, synthetic construct
  misc_feature 1..23: note = Description of Artificial Sequence: Synthetic oligonucleotide
  source 1..23: mol_type = other RNA
tgatagaaagtggtagcaaagcg

SEQ ID NO: 566 - RNA, 23 nt, synthetic construct
  misc_feature 1..23: note = Description of Artificial Sequence: Synthetic oligonucleotide
  source 1..23: mol_type = other RNA
aggatttgttggcttttcgatag

SEQ ID NO: 567 - RNA, 23 nt, synthetic construct
  misc_feature 1..23: note = Description of Artificial Sequence: Synthetic oligonucleotide
  source 1..23: mol_type = other RNA
atgcacatgggattcatgggaat

SEQ ID NO: 568 - RNA, 23 nt, synthetic construct
  misc_feature 1..23: note = Description of Artificial Sequence: Synthetic oligonucleotide
  source 1..23: mol_type = other RNA
tttacctcaagaaatgccttatg

SEQ ID NO: 569 - RNA, 23 nt, synthetic construct
  misc_feature 1..23: note = Description of Artificial Sequence: Synthetic oligonucleotide
  source 1..23: mol_type = other RNA
ttaaatacctccatcagttgctg

SEQ ID NO: 570 - RNA, 23 nt, synthetic construct
  misc_feature 1..23: note = Description of Artificial Sequence: Synthetic oligonucleotide
  source 1..23: mol_type = other RNA
agatatggtgtcaaacttaaata

SEQ ID NO: 571 - RNA, 23 nt, synthetic construct
  misc_feature 1..23: note = Description of Artificial Sequence: Synthetic oligonucleotide
  source 1..23: mol_type = other RNA
aaatgcacatgggattcatggga

SEQ ID NO: 572 - RNA, 23 nt, synthetic construct
  misc_feature 1..23: note = Description of Artificial Sequence: Synthetic oligonucleotide
  source 1..23: mol_type = other RNA
agtaaatggtgttaaccagcacc

SEQ ID NO: 573 - RNA, 23 nt, synthetic construct
  misc_feature 1..23: note = Description of Artificial Sequence: Synthetic oligonucleotide
  source 1..23: mol_type = other RNA
atttgttggcttttcgatagagt

SEQ ID NO: 574 - RNA, 23 nt, synthetic construct
  misc_feature 1..23: note = Description of Artificial Sequence: Synthetic oligonucleotide
  source 1..23: mol_type = other RNA
aaagtggtagcaaagcgggaatt

SEQ ID NO: 575 - RNA, 23 nt, synthetic construct
  misc_feature 1..23: note = Description of Artificial Sequence: Synthetic oligonucleotide
  source 1..23: mol_type = other RNA
tcaaacttaaatacctccatcag

SEQ ID NO: 576 - RNA, 23 nt, synthetic construct
  misc_feature 1..23: note = Description of Artificial Sequence: Synthetic oligonucleotide
  source 1..23: mol_type = other RNA
ttgaaggtaagggatttgtctcc

SEQ ID NO: 577 - RNA, 23 nt, synthetic construct
  misc_feature 1..23: note = Description of Artificial Sequence: Synthetic oligonucleotide
  source 1..23: mol_type = other RNA
tgctgatagaaagtggtagcaaa

SEQ ID NO: 578 - RNA, 23 nt, synthetic construct
  misc_feature 1..23: note = Description of Artificial Sequence: Synthetic oligonucleotide
  source 1..23: mol_type = other RNA
ttcctatcacattggaatacatg

SEQ ID NO: 579 - RNA, 23 nt, synthetic construct
  misc_feature 1..23: note = Description of Artificial Sequence: Synthetic oligonucleotide
  source 1..23: mol_type = other RNA
ttttcgatagagtcggcagttca

SEQ ID NO: 580 - RNA, 23 nt, synthetic construct
  misc_feature 1..23: note = Description of Artificial Sequence: Synthetic oligonucleotide
  source 1..23: mol_type = other RNA
tggcttttcgatagagtcggcag

SEQ ID NO: 581 - RNA, 23 nt, synthetic construct
  misc_feature 1..23: note = Description of Artificial Sequence: Synthetic oligonucleotide
  source 1..23: mol_type = other RNA
atatggtgtcaaacttaaatacc

SEQ ID NO: 582 - RNA, 23 nt, synthetic construct
  misc_feature 1..23: note = Description of Artificial Sequence: Synthetic oligonucleotide
  source 1..23: mol_type = other RNA
tgaacagatcgacaaggcccatg

SEQ ID NO: 583 - RNA, 23 nt, synthetic construct
  misc_feature 1..23: note = Description of Artificial Sequence: Synthetic oligonucleotide
  source 1..23: mol_type = other RNA
tcattgaaggtaagggatttgtc

SEQ ID NO: 584 - RNA, 23 nt, synthetic construct
  misc_feature 1..23: note = Description of Artificial Sequence: Synthetic oligonucleotide
  source 1..23: mol_type = other RNA
aacaatacctgggagtttggact

SEQ ID NO: 585 - RNA, 23 nt, synthetic construct
  misc_feature 1..23: note = Description of Artificial Sequence: Synthetic oligonucleotide
  source 1..23: mol_type = other RNA
tttcgatagagtcggcagttcag

SEQ ID NO: 586 - RNA, 23 nt, synthetic construct
  misc_feature 1..23: note = Description of Artificial Sequence: Synthetic oligonucleotide
  source 1..23: mol_type = other RNA
tattggacacccatttgttgatg

SEQ ID NO: 587 - RNA, 23 nt, synthetic construct
  misc_feature 1..23: note = Description of Artificial Sequence: Synthetic oligonucleotide
  source 1..23: mol_type = other RNA
ttaaccagcaccagaacagtgag

SEQ ID NO: 588 - RNA, 23 nt, synthetic construct
  misc_feature 1..23: note = Description of Artificial Sequence: Synthetic oligonucleotide
  source 1..23: mol_type = other RNA
tccttcaaactgaagccgtcctc

SEQ ID NO: 589 - RNA, 23 nt, synthetic construct
  misc_feature 1..23: note = Description of Artificial Sequence: Synthetic oligonucleotide
  source 1..23: mol_type = other RNA
tgcattttccttgaagtccaggg

SEQ ID NO: 590 - RNA, 23 nt, synthetic construct
  misc_feature 1..23: note = Description of Artificial Sequence: Synthetic oligonucleotide
  source 1..23: mol_type = other RNA
tggtgtcaaacttaaatacctcc

SEQ ID NO: 591 - RNA, 23 nt, synthetic construct
  misc_feature 1..23: note = Description of Artificial Sequence: Synthetic oligonucleotide
  source 1..23: mol_type = other RNA
ttccacaggcccttgaagtaaat

SEQ ID NO: 592 - RNA, 23 nt, synthetic construct
  misc_feature 1..23: note = Description of Artificial Sequence: Synthetic oligonucleotide
  source 1..23: mol_type = other RNA
taagggatttgtctccaaaaagg

SEQ ID NO: 593 - RNA, 23 nt, synthetic construct
  misc_feature 1..23: note = Description of Artificial Sequence: Synthetic oligonucleotide
  source 1..23: mol_type = other RNA
tttagcgaacggccagcaatcac

SEQ ID NO: 594 - RNA, 23 nt, synthetic construct
  misc_feature 1..23: note = Description of Artificial Sequence: Synthetic oligonucleotide
  source 1..23: mol_type = other RNA
ttggcttttcgatagagtcggca

SEQ ID NO: 595 - RNA, 23 nt, synthetic construct
  misc_feature 1..23: note = Description of Artificial Sequence: Synthetic oligonucleotide
  source 1..23: mol_type = other RNA
aggcccttgaagtaaatggtgtt

SEQ ID NO: 596 - RNA, 23 nt, synthetic construct
  misc_feature 1..23: note = Description of Artificial Sequence: Synthetic oligonucleotide
  source 1..23: mol_type = other RNA
tcattacaggcacccagcttggt

SEQ ID NO: 597 - RNA, 23 nt, synthetic construct
  misc_feature 1..23: note = Description of Artificial Sequence: Synthetic oligonucleotide
  source 1..23: mol_type = other RNA
tgcccatgaagataatagtgttc

SEQ ID NO: 598 - RNA, 23 nt, synthetic construct
  misc_feature 1..23: note = Description of Artificial Sequence: Synthetic oligonucleotide
  source 1..23: mol_type = other RNA
tggattgctctgcattttccttg

SEQ ID NO: 599 - RNA, 23 nt, synthetic construct
  misc_feature 1..23: note = Description of Artificial Sequence: Synthetic oligonucleotide
  source 1..23: mol_type = other RNA
atggtgttaaccagcaccagaac

SEQ ID NO: 600 - RNA, 23 nt, synthetic construct
  misc_feature 1..23: note = Description of Artificial Sequence: Synthetic oligonucleotide
  source 1..23: mol_type = other RNA
tgtgcagatgtccacagggctcc

SEQ ID NO: 601 - RNA, 23 nt, synthetic construct
  misc_feature 1..23: note = Description of Artificial Sequence: Synthetic oligonucleotide
  source 1..23: mol_type = other RNA
ttcagtttggcaaagaagaagtg

SEQ ID NO: 602 - RNA, 23 nt, synthetic construct
  misc_feature 1..23: note = Description of Artificial Sequence: Synthetic oligonucleotide
  source 1..23: mol_type = other RNA
tcatagcaaaagccgtggagata

SEQ ID NO: 603 - RNA, 23 nt, synthetic construct
  misc_feature 1..23: note = Description of Artificial Sequence: Synthetic oligonucleotide
  source 1..23: mol_type = other RNA
ttcttggaatctgccaggtgctg

SEQ ID NO: 604 - RNA, 23 nt, synthetic construct
  misc_feature 1..23: note = Description of Artificial Sequence: Synthetic oligonucleotide
  source 1..23: mol_type = other RNA
ttggctactctgcccatgaagat

SEQ ID NO: 605 - RNA, 23 nt, synthetic construct
  misc_feature 1..23: note = Description of Artificial Sequence: Synthetic oligonucleotide
  source 1..23: mol_type = other RNA
ttggctgatactaacttggagga

SEQ ID NO: 606 - RNA, 23 nt, synthetic construct
  misc_feature 1..23: note = Description of Artificial Sequence: Synthetic oligonucleotide
  source 1..23: mol_type = other RNA
ttgaagtaaatggtgttaaccag

SEQ ID NO: 607 - RNA, 23 nt, synthetic construct
  misc_feature 1..23: note = Description of Artificial Sequence: Synthetic oligonucleotide
  source 1..23: mol_type = other RNA
ttgaagtaaatggtgttaaccag

SEQ ID NO: 608 - RNA, 23 nt, synthetic construct
  misc_feature 1..23: note = Description of Artificial Sequence: Synthetic oligonucleotide
  source 1..23: mol_type = other RNA
ttgaagtaaatggtgttaaccag

SEQ ID NO: 609 - RNA, 23 nt, synthetic construct
  misc_feature 1..23: note = Description of Artificial Sequence: Synthetic oligonucleotide
  source 1..23: mol_type = other RNA
ttgaagtaaatggtgttaaccag

SEQ ID NO: 610 - RNA, 23 nt, synthetic construct
  misc_feature 1..23: note = Description of Artificial Sequence: Synthetic oligonucleotide
  source 1..23: mol_type = other RNA
ttgaagtaaatggtgttaaccag

SEQ ID NO: 611 - RNA, 23 nt, synthetic construct
  misc_feature 1..23: note = Description of Artificial Sequence: Synthetic oligonucleotide
  source 1..23: mol_type = other RNA
ttgaagtaaatggtgttaaccag

SEQ ID NO: 612 - RNA, 23 nt, synthetic construct
  misc_feature 1..23: note = Description of Artificial Sequence: Synthetic oligonucleotide
  source 1..23: mol_type = other RNA
ttgaagtaaatggtgttaaccag

SEQ ID NO: 613 - RNA, 23 nt, synthetic construct
  misc_feature 1..23: note = Description of Artificial Sequence: Synthetic oligonucleotide
  source 1..23: mol_type = other RNA
ttgaagtaaatggtgttaaccag

SEQ ID NO: 614 - RNA, 23 nt, synthetic construct
  misc_feature 1..23: note = Description of Artificial Sequence: Synthetic oligonucleotide
  source 1..23: mol_type = other RNA
ttgaagtaaatggtgttaaccag

SEQ ID NO: 615 - RNA, 23 nt, synthetic construct
  misc_feature 1..23: note = Description of Artificial Sequence: Synthetic oligonucleotide
  source 1..23: mol_type = other RNA
ttgaagtaaatggtgttaaccag

SEQ ID NO: 616 - RNA, 23 nt, synthetic construct
  misc_feature 1..23: note = Description of Artificial Sequence: Synthetic oligonucleotide
  source 1..23: mol_type = other RNA
ttgaagtaaatggtgttaaccag

SEQ ID NO: 617 - RNA, 23 nt, synthetic construct
  misc_feature 1..23: note = Description of Artificial Sequence: Synthetic oligonucleotide
  source 1..23: mol_type = other RNA
ttgaagtaaatggtgttaaccag

SEQ ID NO: 618 - RNA, 23 nt, synthetic construct
  misc_feature 1..23: note = Description of Artificial Sequence: Synthetic oligonucleotide
  source 1..23: mol_type = other RNA
ttgaagtaaatggtgttaaccag

SEQ ID NO: 619 - RNA, 23 nt, synthetic construct
  misc_feature 1..23: note = Description of Artificial Sequence: Synthetic oligonucleotide
  source 1..23: mol_type = other RNA
ttgaagtaaatggtgttaaccag

SEQ ID NO: 620 - RNA, 23 nt, synthetic construct
  misc_feature 1..23: note = Description of Artificial Sequence: Synthetic oligonucleotide
  source 1..23: mol_type = other RNA
ttgaagtaaatggtgttaaccag

SEQ ID NO: 621 - RNA, 23 nt, synthetic construct
  misc_feature 1..23: note = Description of Artificial Sequence: Synthetic oligonucleotide
  source 1..23: mol_type = other RNA
ttgaagtaaatggtgttaaccag

SEQ ID NO: 622 - RNA, 23 nt, synthetic construct
  misc_feature 1..23: note = Description of Artificial Sequence: Synthetic oligonucleotide
  source 1..23: mol_type = other RNA
ttgaagtaaatggtgttaaccag

SEQ ID NO: 623 - RNA, 23 nt, synthetic construct
  misc_feature 1..23: note = Description of Artificial Sequence: Synthetic oligonucleotide
  source 1..23: mol_type = other RNA
ttgaagtaaatggtgttaaccag

SEQ ID NO: 624 - RNA, 23 nt, synthetic construct
  misc_feature 1..23: note = Description of Artificial Sequence: Synthetic oligonucleotide
  source 1..23: mol_type = other RNA
ttgaagtaaatggtgttaaccag

SEQ ID NO: 625 - RNA, 23 nt, synthetic construct
  misc_feature 1..23: note = Description of Artificial Sequence: Synthetic oligonucleotide
  source 1..23: mol_type = other RNA
ttgaagtaaatggtgttaaccag

SEQ ID NO: 626 - RNA, 23 nt, synthetic construct
  misc_feature 1..23: note = Description of Artificial Sequence: Synthetic oligonucleotide
  source 1..23: mol_type = other RNA
ttgaagtaaatggtgttaaccag

SEQ ID NO: 627 - RNA, 23 nt, synthetic construct
  misc_feature 1..23: note = Description of Artificial Sequence: Synthetic oligonucleotide
  source 1..23: mol_type = other RNA
ttgaagtaaatggtgttaaccag

SEQ ID NO: 628 - RNA, 23 nt, synthetic construct
  misc_feature 1..23: note = Description of Artificial Sequence: Synthetic oligonucleotide
  source 1..23: mol_type = other RNA
ttgaagtaaatggtgttaaccag

SEQ ID NO: 629 - RNA, 23 nt, synthetic construct
  misc_feature 1..23: note = Description of Artificial Sequence: Synthetic oligonucleotide
  source 1..23: mol_type = other RNA
ttgaagtaaatggtgttaaccag

SEQ ID NO: 630 - RNA, 23 nt, synthetic construct
  misc_feature 1..23: note = Description of Artificial Sequence: Synthetic oligonucleotide
  source 1..23: mol_type = other RNA
ttgaagtaaatggtgttaaccag

SEQ ID NO: 631 - RNA, 23 nt, synthetic construct
  misc_feature 1..23: note = Description of Artificial Sequence: Synthetic oligonucleotide
  source 1..23: mol_type = other RNA
ttgaagtaaatggtgttaaccag

SEQ ID NO: 632 - RNA, 23 nt, synthetic construct
  misc_feature 1..23: note = Description of Artificial Sequence: Synthetic oligonucleotide
  source 1..23: mol_type = other RNA
ttgaagtaaatggtgttaaccag

SEQ ID NO: 633 - RNA, 23 nt, synthetic construct
  misc_feature 1..23: note = Description of Artificial Sequence: Synthetic oligonucleotide
  source 1..23: mol_type = other RNA
ttgaagtaaatggtgttaaccag

SEQ ID NO: 634 - RNA, 23 nt, synthetic construct
  misc_feature 1..23: note = Description of Artificial Sequence: Synthetic oligonucleotide
  source 1..23: mol_type = other RNA
ttgaagtaaatggtgttaaccag

SEQ ID NO: 635 - RNA, 23 nt, synthetic construct
  misc_feature 1..23: note = Description of Artificial Sequence: Synthetic oligonucleotide
  source 1..23: mol_type = other RNA
ttgaagtaaatggtgttaaccag

SEQ ID NO: 636 - RNA, 23 nt, synthetic construct
  misc_feature 1..23: note = Description of Artificial Sequence: Synthetic oligonucleotide
  source 1..23: mol_type = other RNA
ttgaagtaaatggtgttaaccag

SEQ ID NO: 637 - RNA, 23 nt, synthetic construct
  misc_feature 1..23: note = Description of Artificial Sequence: Synthetic oligonucleotide
  source 1..23: mol_type = other RNA
ttgaagtaaatggtgttaaccag

SEQ ID NO: 638 - RNA, 23 nt, synthetic construct
  misc_feature 1..23: note = Description of Artificial Sequence: Synthetic oligonucleotide
  source 1..23: mol_type = other RNA
ttgaagtaaatggtgttaaccag

SEQ ID NO: 639 - RNA, 23 nt, synthetic construct
  misc_feature 1..23: note = Description of Artificial Sequence: Synthetic oligonucleotide
  source 1..23: mol_type = other RNA
ttgaagtaaatggtgttaaccag

SEQ ID NO: 640 - RNA, 23 nt, synthetic construct
  misc_feature 1..23: note = Description of Artificial Sequence: Synthetic oligonucleotide
  source 1..23: mol_type = other RNA
ttgaagtaaatggtgttaaccag

SEQ ID NO: 641 - RNA, 23 nt, synthetic construct
  misc_feature 1..23: note = Description of Artificial Sequence: Synthetic oligonucleotide
  source 1..23: mol_type = other RNA
ttgaagtaaatggtgttaaccag

SEQ ID NO: 642 - RNA, 23 nt, synthetic construct
  misc_feature 1..23: note = Description of Artificial Sequence: Synthetic oligonucleotide
  source 1..23: mol_type = other RNA
ttgaagtaaatggtgttaaccag

SEQ ID NO: 643 - RNA, 23 nt, synthetic construct
  misc_feature 1..23: note = Description of Artificial Sequence: Synthetic oligonucleotide
  source 1..23: mol_type = other RNA
ttgaagtaaatggtgttaaccag

SEQ ID NO: 644 - RNA, 23 nt, synthetic construct
  misc_feature 1..23: note = Description of Artificial Sequence: Synthetic oligonucleotide
  source 1..23: mol_type = other RNA
ttgaagtaaatggtgttaaccag

SEQ ID NO: 645 - RNA, 23 nt, synthetic construct
  misc_feature 1..23: note = Description of Artificial Sequence: Synthetic oligonucleotide
  source 1..23: mol_type = other RNA
ttgaagtaaatggtgttaaccag

SEQ ID NO: 646 - RNA, 23 nt, synthetic construct
  misc_feature 1..23: note = Description of Artificial Sequence: Synthetic oligonucleotide
  source 1..23: mol_type = other RNA
ttgaagtaaatggtgttaaccag

SEQ ID NO: 647 - RNA, 23 nt, synthetic construct
  misc_feature 1..23: note = Description of Artificial Sequence: Synthetic oligonucleotide
  source 1..23: mol_type = other RNA
ttgaagtaaatggtgttaaccag

SEQ ID NO: 648 - RNA, 23 nt, synthetic construct
  misc_feature 1..23: note = Description of Artificial Sequence: Synthetic oligonucleotide
  source 1..23: mol_type = other RNA
ttgaagtaaatggtgttaaccag

SEQ ID NO: 649 - RNA, 23 nt, synthetic construct
  misc_feature 1..23: note = Description of Artificial Sequence: Synthetic oligonucleotide
  source 1..23: mol_type = other RNA
ttgaagtaaatggtgttaaccag

SEQ ID NO: 650 - RNA, 23 nt, synthetic construct
  misc_feature 1..23: note = Description of Artificial Sequence: Synthetic oligonucleotide
  source 1..23: mol_type = other RNA
ttgaagtaaatggtgttaaccag

SEQ ID NO: 651 - RNA, 23 nt, synthetic construct
  misc_feature 1..23: note = Description of Artificial Sequence: Synthetic oligonucleotide
  source 1..23: mol_type = other RNA
ttgaagtaaatggtgttaaccag

SEQ ID NO: 652 - RNA, 23 nt, synthetic construct
  misc_feature 1..23: note = Description of Artificial Sequence: Synthetic oligonucleotide
  source 1..23: mol_type = other RNA
ttgaagtaaatggtgttaaccag

SEQ ID NO: 653 - RNA, 23 nt, synthetic construct
  misc_feature 1..23: note = Description of Artificial Sequence: Synthetic oligonucleotide
  source 1..23: mol_type = other RNA
ttgaagtaaatggtgttaaccag

SEQ ID NO: 654 - RNA, 23 nt, synthetic construct
  misc_feature 1..23: note = Description of Artificial Sequence: Synthetic oligonucleotide
  source 1..23: mol_type = other RNA
ttgaagtaaatggtgttaaccag

SEQ ID NO: 655 - RNA, 23 nt, synthetic construct
  misc_feature 1..23: note = Description of Artificial Sequence: Synthetic oligonucleotide
  source 1..23: mol_type = other RNA
ttgaagtaaatggtgttaaccag

SEQ ID NO: 656 - RNA, 23 nt, synthetic construct
  misc_feature 1..23: note = Description of Artificial Sequence: Synthetic oligonucleotide
  source 1..23: mol_type = other RNA
ttgaagtaaatggtgttaaccag

SEQ ID NO: 657 - RNA, 23 nt, synthetic construct
  misc_feature 1..23: note = Description of Artificial Sequence: Synthetic oligonucleotide
  source 1..23: mol_type = other RNA
ttgaagtaaatggtgttaaccag

SEQ ID NO: 658 - RNA, 23 nt, synthetic construct
  misc_feature 1..23: note = Description of Artificial Sequence: Synthetic oligonucleotide
  source 1..23: mol_type = other RNA
ttgaagtaaatggtgttaaccag

SEQ ID NO: 659 - RNA, 23 nt, synthetic construct
  misc_feature 1..23: note = Description of Artificial Sequence: Synthetic oligonucleotide
  source 1..23: mol_type = other RNA
ttgaagtaaatggtgttaaccag

SEQ ID NO: 660 - RNA, 23 nt, synthetic construct
  misc_feature 1..23: note = Description of Artificial Sequence: Synthetic oligonucleotide
  source 1..23: mol_type = other RNA
ttgaagtaaatggtgttaaccag

SEQ ID NO: 661 - RNA, 23 nt, synthetic construct
  misc_feature 1..23: note = Description of Artificial Sequence: Synthetic oligonucleotide
  source 1..23: mol_type = other RNA
ttgaagtaaatggtgttaaccag

SEQ ID NO: 662 - RNA, 23 nt, synthetic construct
  misc_feature 1..23: note = Description of Artificial Sequence: Synthetic oligonucleotide
  source 1..23: mol_type = other RNA
ttgaagtaaatggtgttaaccag

SEQ ID NO: 663 - RNA, 23 nt, synthetic construct
  misc_feature 1..23: note = Description of Artificial Sequence: Synthetic oligonucleotide
  source 1..23: mol_type = other RNA
ttgaagtaaatggtgttaaccag

SEQ ID NO: 664 - RNA, 23 nt, synthetic construct
  misc_feature 1..23: note = Description of Artificial Sequence: Synthetic oligonucleotide
  source 1..23: mol_type = other RNA
ttgaagtaaatggtgttaaccag

SEQ ID NO: 665 - RNA, 23 nt, synthetic construct
  misc_feature 1..23: note = Description of Artificial Sequence: Synthetic oligonucleotide
  source 1..23: mol_type = other RNA
ttgaagtaaatggtgttaaccag

SEQ ID NO: 666 - RNA, 23 nt, synthetic construct
  misc_feature 1..23: note = Description of Artificial Sequence: Synthetic oligonucleotide
  source 1..23: mol_type = other RNA
ttgaagtaaatggtgttaaccag

SEQ ID NO: 667 - RNA, 23 nt, synthetic construct
  misc_feature 1..23: note = Description of Artificial Sequence: Synthetic oligonucleotide
  source 1..23: mol_type = other RNA
ttgaagtaaatggtgttaaccag

SEQ ID NO: 668 - RNA, 23 nt, synthetic construct
  misc_feature 1..23: note = Description of Artificial Sequence: Synthetic oligonucleotide
  source 1..23: mol_type = other RNA
ttgaagtaaatggtgttaaccag

SEQ ID NO: 669 - RNA, 23 nt, synthetic construct
  misc_feature 1..23: note = Description of Artificial Sequence: Synthetic oligonucleotide
  source 1..23: mol_type = other RNA
ttgaagtaaatggtgttaaccag

SEQ ID NO: 670 - RNA, 23 nt, synthetic construct
  misc_feature 1..23: note = Description of Artificial Sequence: Synthetic oligonucleotide
  source 1..23: mol_type = other RNA
ttgaagtaaatggtgttaaccag

SEQ ID NO: 671 - RNA, 23 nt, synthetic construct
  misc_feature 1..23: note = Description of Artificial Sequence: Synthetic oligonucleotide
  source 1..23: mol_type = other RNA
ttgaagtaaatggtgttaaccag

SEQ ID NO: 672 - RNA, 23 nt, synthetic construct
  misc_feature 1..23: note = Description of Artificial Sequence: Synthetic oligonucleotide
  source 1..23: mol_type = other RNA
ttgaagtaaatggtgttaaccag

SEQ ID NO: 673 - RNA, 23 nt, synthetic construct
  misc_feature 1..23: note = Description of Artificial Sequence: Synthetic oligonucleotide
  source 1..23: mol_type = other RNA
ttgaagtaaatggtgttaaccag

SEQ ID NO: 674 - RNA, 23 nt, synthetic construct
  misc_feature 1..23: note = Description of Artificial Sequence: Synthetic oligonucleotide
  source 1..23: mol_type = other RNA
ttgaagtaaatggtgttaaccag

SEQ ID NO: 675 - RNA, 23 nt, synthetic construct
  misc_feature 1..23: note = Description of Artificial Sequence: Synthetic oligonucleotide
  source 1..23: mol_type = other RNA
ttgaagtaaatggtgttaaccag

SEQ ID NO: 676 - RNA, 23 nt, synthetic construct
  misc_feature 1..23: note = Description of Artificial Sequence: Synthetic oligonucleotide
  source 1..23: mol_type = other RNA
ttgaagtaaatggtgttaaccag

SEQ ID NO: 677 - RNA, 23 nt, synthetic construct
  misc_feature 1..23: note = Description of Artificial Sequence: Synthetic oligonucleotide
  source 1..23: mol_type = other RNA
ttgaagtaaatggtgttaaccag

SEQ ID NO: 678 - RNA, 23 nt, synthetic construct
  misc_feature 1..23: note = Description of Artificial Sequence: Synthetic oligonucleotide
  source 1..23: mol_type = other RNA
ttgaagtaaatggtgttaaccag

SEQ ID NO: 679 - RNA, 23 nt, synthetic construct
  misc_feature 1..23: note = Description of Artificial Sequence: Synthetic oligonucleotide
  source 1..23: mol_type = other RNA
ttgaagtaaatggtgttaaccag

SEQ ID NO: 680 - RNA, 23 nt, synthetic construct
  misc_feature 1..23: note = Description of Artificial Sequence: Synthetic oligonucleotide
  source 1..23: mol_type = other RNA
ttgaagtaaatggtgttaaccag

SEQ ID NO: 681 - RNA, 23 nt, synthetic construct
  misc_feature 1..23: note = Description of Artificial Sequence: Synthetic oligonucleotide
  source 1..23: mol_type = other RNA
ttgaagtaaatggtgttaaccag

SEQ ID NO: 682 - RNA, 23 nt, synthetic construct
  misc_feature 1..23: note = Description of Artificial Sequence: Synthetic oligonucleotide
  source 1..23: mol_type = other RNA
ttgaagtaaatggtgttaaccag

SEQ ID NO: 683 - RNA, 23 nt, synthetic construct
  misc_feature 1..23: note = Description of Artificial Sequence: Synthetic oligonucleotide
  source 1..23: mol_type = other RNA
ttgaagtaaatggtgttaaccag

SEQ ID NO: 684 - RNA, 23 nt, synthetic construct
  misc_feature 1..23: note = Description of Artificial Sequence: Synthetic oligonucleotide
  source 1..23: mol_type = other RNA
ttgaagtaaatggtgttaaccag

SEQ ID NO: 685 - RNA, 23 nt, synthetic construct
  misc_feature 1..23: note = Description of Artificial Sequence: Synthetic oligonucleotide
  source 1..23: mol_type = other RNA
ttgaagtaaatggtgttaaccag

SEQ ID NO: 686 - RNA, 23 nt, synthetic construct
  misc_feature 1..23: note = Description of Artificial Sequence: Synthetic oligonucleotide
  source 1..23: mol_type = other RNA
ttgaagtaaatggtgttaaccag

SEQ ID NO: 687 - RNA, 23 nt, synthetic construct
  misc_feature 1..23: note = Description of Artificial Sequence: Synthetic oligonucleotide
  source 1..23: mol_type = other RNA
ttgaagtaaatggtgttaaccag

SEQ ID NO: 688 - RNA, 23 nt, synthetic construct
  misc_feature 1..23: note = Description of Artificial Sequence: Synthetic oligonucleotide
  source 1..23: mol_type = other RNA
ttgaagtaaatggtgttaaccag

SEQ ID NO: 689 - RNA, 23 nt, synthetic construct
  misc_feature 1..23: note = Description of Artificial Sequence: Synthetic oligonucleotide
  source 1..23: mol_type = other RNA
ttgaagtaaatggtgttaaccag

SEQ ID NO: 690 - RNA, 23 nt, synthetic construct
  misc_feature 1..23: note = Description of Artificial Sequence: Synthetic oligonucleotide
  source 1..23: mol_type = other RNA
ttgaagtaaatggtgttaaccag

SEQ ID NO: 691 - RNA, 23 nt, synthetic construct
  misc_feature 1..23: note = Description of Artificial Sequence: Synthetic oligonucleotide
  source 1..23: mol_type = other RNA
ttgaagtaaatggtgttaaccag

SEQ ID NO: 692 - RNA, 23 nt, synthetic construct
  misc_feature 1..23: note = Description of Artificial Sequence: Synthetic oligonucleotide
  source 1..23: mol_type = other RNA
ttgaagtaaatggtgttaaccag

SEQ ID NO: 693 - RNA, 23 nt, synthetic construct
  misc_feature 1..23: note = Description of Artificial Sequence: Synthetic oligonucleotide
  source 1..23: mol_type = other RNA
ttgaagtaaatggtgttaaccag

SEQ ID NO: 694 - RNA, 23 nt, synthetic construct
  misc_feature 1..23: note = Description of Artificial Sequence: Synthetic oligonucleotide
  source 1..23: mol_type = other RNA
ttgaagtaaatggtgttaaccag

SEQ ID NO: 695 - RNA, 23 nt, synthetic construct
  misc_feature 1..23: note = Description of Artificial Sequence: Synthetic oligonucleotide
  source 1..23: mol_type = other RNA
ttgaagtaaatggtgttaaccag

SEQ ID NO: 696 - RNA, 23 nt, synthetic construct
  misc_feature 1..23: note = Description of Artificial Sequence: Synthetic oligonucleotide
  source 1..23: mol_type = other RNA
ttgaagtaaatggtgttaaccag

SEQ ID NO: 697 - RNA, 23 nt, synthetic construct
  misc_feature 1..23: note = Description of Artificial Sequence: Synthetic oligonucleotide
  source 1..23: mol_type = other RNA
ttgaagtaaatggtgttaaccag

SEQ ID NO: 698 - RNA, 23 nt, synthetic construct
  misc_feature 1..23: note = Description of Artificial Sequence: Synthetic oligonucleotide
  source 1..23: mol_type = other RNA
ttgaagtaaatggtgttaaccag

SEQ ID NO: 699 - RNA, 23 nt, synthetic construct
  misc_feature 1..23: note = Description of Artificial Sequence: Synthetic oligonucleotide
  source 1..23: mol_type = other RNA
ttgaagtaaatggtgttaaccag

SEQ ID NO: 700 - RNA, 23 nt, synthetic construct
  misc_feature 1..23: note = Description of Artificial Sequence: Synthetic oligonucleotide
  source 1..23: mol_type = other RNA
ttgaagtaaatggtgttaaccag

SEQ ID NO: 701 - RNA, 23 nt, synthetic construct
  misc_feature 1..23: note = Description of Artificial Sequence: Synthetic oligonucleotide
  source 1..23: mol_type = other RNA
ttgaagtaaatggtgttaaccag

SEQ ID NO: 702 - RNA, 23 nt, synthetic construct
  misc_feature 1..23: note = Description of Artificial Sequence: Synthetic oligonucleotide
  source 1..23: mol_type = other RNA
ttgaagtaaatggtgttaaccag

SEQ ID NO: 703 - RNA, 23 nt, synthetic construct
  misc_feature 1..23: note = Description of Artificial Sequence: Synthetic oligonucleotide
  source 1..23: mol_type = other RNA
ttgaagtaaatggtgttaaccag

SEQ ID NO: 704 - RNA, 23 nt, synthetic construct
  misc_feature 1..23: note = Description of Artificial Sequence: Synthetic oligonucleotide
  source 1..23: mol_type = other RNA
ttgaagtaaatggtgttaaccag

SEQ ID NO: 705 - RNA, 23 nt, synthetic construct
  misc_feature 1..23: note = Description of Artificial Sequence: Synthetic oligonucleotide
  source 1..23: mol_type = other RNA
ttgaagtaaatggtgttaaccag

SEQ ID NO: 706 - RNA, 23 nt, synthetic construct
  misc_feature 1..23: note = Description of Artificial Sequence: Synthetic oligonucleotide
  source 1..23: mol_type = other RNA
ttgaagtaaatggtgttaaccag

SEQ ID NO: 707 - RNA, 23 nt, synthetic construct
  misc_feature 1..23: note = Description of Artificial Sequence: Synthetic oligonucleotide
  source 1..23: mol_type = other RNA
ttgaagtaaatggtgttaaccag

SEQ ID NO: 708 - RNA, 23 nt, synthetic construct
  misc_feature 1..23: note = Description of Artificial Sequence: Synthetic oligonucleotide
  source 1..23: mol_type = other RNA
ttgaagtaaatggtgttaaccag

SEQ ID NO: 709 - RNA, 23 nt, synthetic construct
  misc_feature 1..23: note = Description of Artificial Sequence: Synthetic oligonucleotide
  source 1..23: mol_type = other RNA
ttgaagtaaatggtgttaaccag

SEQ ID NO: 710 - RNA, 23 nt, synthetic construct
  misc_feature 1..23: note = Description of Artificial Sequence: Synthetic oligonucleotide
  source 1..23: mol_type = other RNA
ttgaagtaaatggtgttaaccag

SEQ ID NO: 711 - RNA, 23 nt, synthetic construct
  misc_feature 1..23: note = Description of Artificial Sequence: Synthetic oligonucleotide
  source 1..23: mol_type = other RNA
ttgaagtaaatggtgttaaccag

SEQ ID NO: 712 - RNA, 23 nt, synthetic construct
  misc_feature 1..23: note = Description of Artificial Sequence: Synthetic oligonucleotide
  source 1..23: mol_type = other RNA
ttgaagtaaatggtgttaaccag

SEQ ID NO: 713 - RNA, 23 nt, synthetic construct
  misc_feature 1..23: note = Description of Artificial Sequence: Synthetic oligonucleotide
  source 1..23: mol_type = other RNA
ttgaagtaaatggtgttaaccag

SEQ ID NO: 714 - RNA, 23 nt, synthetic construct
  misc_feature 1..23: note = Description of Artificial Sequence: Synthetic oligonucleotide
  source 1..23: mol_type = other RNA
ttgaagtaaatggtgttaaccag

SEQ ID NO: 715 - RNA, 23 nt, synthetic construct
  misc_feature 1..23: note = Description of Artificial Sequence: Synthetic oligonucleotide
  source 1..23: mol_type = other RNA
ttgaagtaaatggtgttaaccag

SEQ ID NO: 716 - RNA, 23 nt, synthetic construct
  misc_feature 1..23: note = Description of Artificial Sequence: Synthetic oligonucleotide
  source 1..23: mol_type = other RNA
ttgaagtaaatggtgttaaccag

SEQ ID NO: 717 - RNA, 23 nt, synthetic construct
  misc_feature 1..23: note = Description of Artificial Sequence: Synthetic oligonucleotide
  source 1..23: mol_type = other RNA
ttgaagtaaatggtgttaaccag

SEQ ID NO: 718 - RNA, 23 nt, synthetic construct
  misc_feature 1..23: note = Description of Artificial Sequence: Synthetic oligonucleotide
  source 1..23: mol_type = other RNA
ttgaagtaaatggtgttaaccag

SEQ ID NO: 719 - RNA, 23 nt, synthetic construct
  misc_feature 1..23: note = Description of Artificial Sequence: Synthetic oligonucleotide
  source 1..23: mol_type = other RNA
ttgaagtaaatggtgttaaccag

SEQ ID NO: 720 - RNA, 23 nt, synthetic construct
  misc_feature 1..23: note = Description of Artificial Sequence: Synthetic oligonucleotide
  source 1..23: mol_type = other RNA
ttgaagtaaatggtgttaaccag

SEQ ID NO: 721 - RNA, 23 nt, synthetic construct
  misc_feature 1..23: note = Description of Artificial Sequence: Synthetic oligonucleotide
  source 1..23: mol_type = other RNA
ttgaagtaaatggtgttaaccag

SEQ ID NO: 722 - RNA, 23 nt, synthetic construct
  misc_feature 1..23: note = Description of Artificial Sequence: Synthetic oligonucleotide
  source 1..23: mol_type = other RNA
ttgaagtaaatggtgttaaccag

SEQ ID NO: 723 - RNA, 23 nt, synthetic construct
  misc_feature 1..23: note = Description of Artificial Sequence: Synthetic oligonucleotide
  source 1..23: mol_type = other RNA
ttgaagtaaatggtgttaaccag

SEQ ID NO: 724 - RNA, 23 nt, synthetic construct
  misc_feature 1..23: note = Description of Artificial Sequence: Synthetic oligonucleotide
  source 1..23: mol_type = other RNA
ttgaagtaaatggtgttaaccag

SEQ ID NO: 725 - RNA, 23 nt, synthetic construct
  misc_feature 1..23: note = Description of Artificial Sequence: Synthetic oligonucleotide
  source 1..23: mol_type = other RNA
ttgaagtaaatggtgttaaccag

SEQ ID NO: 726 - RNA, 23 nt, synthetic construct
  misc_feature 1..23: note = Description of Artificial Sequence: Synthetic oligonucleotide
  source 1..23: mol_type = other RNA
ttgaagtaaatggtgttaaccag

SEQ ID NO: 727 - RNA, 23 nt, synthetic construct
  misc_feature 1..23: note = Description of Artificial Sequence: Synthetic oligonucleotide
  source 1..23: mol_type = other RNA
ttgaagtaaatggtgttaaccag

SEQ ID NO: 728 - RNA, 23 nt, synthetic construct
  misc_feature 1..23: note = Description of Artificial Sequence: Synthetic oligonucleotide
  source 1..23: mol_type = other RNA
ttgaagtaaatggtgttaaccag

SEQ ID NO: 729 - RNA, 23 nt, synthetic construct
  misc_feature 1..23: note = Description of Artificial Sequence: Synthetic oligonucleotide
  source 1..23: mol_type = other RNA
ttgaagtaaatggtgttaaccag

SEQ ID NO: 730 - RNA, 23 nt, synthetic construct
  misc_feature 1..23: note = Description of Artificial Sequence: Synthetic oligonucleotide
  source 1..23: mol_type = other RNA
ttgaagtaaatggtgttaaccag

SEQ ID NO: 731 - RNA, 23 nt, synthetic construct
  misc_feature 1..23: note = Description of Artificial Sequence: Synthetic oligonucleotide
  source 1..23: mol_type = other RNA
ttgaagtaaatggtgttaaccag

SEQ ID NO: 732 - RNA, 23 nt, synthetic construct
  misc_feature 1..23: note = Description of Artificial Sequence: Synthetic oligonucleotide
  source 1..23: mol_type = other RNA
ttgaagtaaatggtgttaaccag

SEQ ID NO: 733 - RNA, 23 nt, synthetic construct
  misc_feature 1..23: note = Description of Artificial Sequence: Synthetic oligonucleotide
  source 1..23: mol_type = other RNA
ttgaagtaaatggtgttaaccag

SEQ ID NO: 734 - RNA, 23 nt, synthetic construct
  misc_feature 1..23: note = Description of Artificial Sequence: Synthetic oligonucleotide
  source 1..23: mol_type = other RNA
ttgaagtaaatggtgttaaccag

SEQ ID NO: 735 - RNA, 23 nt, synthetic construct
  misc_feature 1..23: note = Description of Artificial Sequence: Synthetic oligonucleotide
  source 1..23: mol_type = other RNA
ttgaagtaaatggtgttaaccag

SEQ ID NO: 736 - RNA, 23 nt, synthetic construct
  misc_feature 1..23: note = Description of Artificial Sequence: Synthetic oligonucleotide
  source 1..23: mol_type = other RNA
ttgaagtaaatggtgttaaccag

SEQ ID NO: 737 - RNA, 23 nt, synthetic construct
  misc_feature 1..23: note = Description of Artificial Sequence: Synthetic oligonucleotide
  source 1..23: mol_type = other RNA
ttgaagtaaatggtgttaaccag

SEQ ID NO: 738 - RNA, 23 nt, synthetic construct
  misc_feature 1..23: note = Description of Artificial Sequence: Synthetic oligonucleotide
  source 1..23: mol_type = other RNA
ttgaagtaaatggtgttaaccag

SEQ ID NO: 739 - RNA, 23 nt, synthetic construct
  misc_feature 1..23: note = Description of Artificial Sequence: Synthetic oligonucleotide
  source 1..23: mol_type = other RNA
ttgaagtaaatggtgttaaccag

SEQ ID NO: 740 - RNA, 23 nt, synthetic construct
  misc_feature 1..23: note = Description of Artificial Sequence: Synthetic oligonucleotide
  source 1..23: mol_type = other RNA
ttgaagtaaatggtgttaaccag

SEQ ID NO: 741 - RNA, 23 nt, synthetic construct
  misc_feature 1..23: note = Description of Artificial Sequence: Synthetic oligonucleotide
  source 1..23: mol_type = other RNA
ttgaagtaaatggtgttaaccag

SEQ ID NO: 742 - RNA, 23 nt, synthetic construct
  misc_feature 1..23: note = Description of Artificial Sequence: Synthetic oligonucleotide
  source 1..23: mol_type = other RNA
ttgaagtaaatggtgttaaccag

SEQ ID NO: 743 - RNA, 23 nt, synthetic construct
  misc_feature 1..23: note = Description of Artificial Sequence: Synthetic oligonucleotide
  source 1..23: mol_type = other RNA
ttgaagtaaatggtgttaaccag

SEQ ID NO: 744 - RNA, 23 nt, synthetic construct
  misc_feature 1..23: note = Description of Artificial Sequence: Synthetic oligonucleotide
  source 1..23: mol_type = other RNA
ttgaagtaaatggtgttaaccag

SEQ ID NO: 745 - RNA, 23 nt, synthetic construct
  misc_feature 1..23: note = Description of Artificial Sequence: Synthetic oligonucleotide
  source 1..23: mol_type = other RNA
ttgaagtaaatggtgttaaccag

SEQ ID NO: 746 - RNA, 23 nt, synthetic construct
  misc_feature 1..23: note = Description of Artificial Sequence: Synthetic oligonucleotide
  source 1..23: mol_type = other RNA
ttgaagtaaatggtgttaaccag

SEQ ID NO: 747 - RNA, 21 nt, synthetic construct
  misc_feature 1..21: note = Description of Artificial Sequence: Synthetic oligonucleotide
  source 1..21: mol_type = other RNA
ttgaagtaaatggtgttaacc

SEQ ID NO: 748 - RNA, 21 nt, synthetic construct
  misc_feature 1..21: note = Description of Artificial Sequence: Synthetic oligonucleotide
  source 1..21: mol_type = other RNA
ttgaagtaaatggtgttaacc

SEQ ID NO: 749 - RNA, 21 nt, synthetic construct
  misc_feature 1..21: note = Description of Artificial Sequence: Synthetic oligonucleotide
  source 1..21: mol_type = other RNA
ttgaagtaaatggtgttaacc

SEQ ID NO: 750 - RNA, 21 nt, synthetic construct
  misc_feature 1..21: note = Description of Artificial Sequence: Synthetic oligonucleotide
  source 1..21: mol_type = other RNA
ttgaagtaaatggtgttaacc

SEQ ID NO: 751 - RNA, 21 nt, synthetic construct
  misc_feature 1..21: note = Description of Artificial Sequence: Synthetic oligonucleotide
  source 1..21: mol_type = other RNA
ttgaagtaaatggtgttaacc

SEQ ID NO: 752 - RNA, 19 nt, synthetic construct
  misc_feature 1..19: note = Description of Artificial Sequence: Synthetic oligonucleotide
  source 1..19: mol_type = other RNA
ttgaagtaaatggtgttaa

SEQ ID NO: 753 - RNA, 19 nt, synthetic construct
  misc_feature 1..19: note = Description of Artificial Sequence: Synthetic oligonucleotide
  source 1..19: mol_type = other RNA
ttgaagtaaatggtgttaa

SEQ ID NO: 754 - RNA, 19 nt, synthetic construct
  misc_feature 1..19: note = Description of Artificial Sequence: Synthetic oligonucleotide
  source 1..19: mol_type = other RNA
ttgaagtaaatggtgttaa

SEQ ID NO: 755 - RNA, 19 nt, synthetic construct
  misc_feature 1..19: note = Description of Artificial Sequence: Synthetic oligonucleotide
  source 1..19: mol_type = other RNA
ttgaagtaaatggtgttaa

SEQ ID NO: 756 - RNA, 19 nt, synthetic construct
  misc_feature 1..19: note = Description of Artificial Sequence: Synthetic oligonucleotide
  source 1..19: mol_type = other RNA
ttgaagtaaatggtgttaa

SEQ ID NO: 757 - RNA, 23 nt, synthetic construct
  misc_feature 1..23: note = Description of Artificial Sequence: Synthetic oligonucleotide
  source 1..23: mol_type = other RNA
ttgaagtaaatggtgttaaccag

SEQ ID NO: 758 - RNA, 23 nt, synthetic construct
  misc_feature 1..23: note = Description of Artificial Sequence: Synthetic oligonucleotide
  source 1..23: mol_type = other RNA
ttgaagtaaatggtgttaaccag

SEQ ID NO: 759 - RNA, 23 nt, synthetic construct
  misc_feature 1..23: note = Description of Artificial Sequence: Synthetic oligonucleotide
  source 1..23: mol_type = other RNA
ttgaagtaaatggtgttaaccag

SEQ ID NO: 760 - RNA, 23 nt, synthetic construct
  misc_feature 1..23: note = Description of Artificial Sequence: Synthetic oligonucleotide
  source 1..23: mol_type = other RNA
ttgaagtaaatggtgttaaccag

SEQ ID NO: 761 - RNA, 23 nt, synthetic construct
  misc_feature 1..23: note = Description of Artificial Sequence: Synthetic oligonucleotide
  source 1..23: mol_type = other RNA
ttgaagtaaatggtgttaaccag

SEQ ID NO: 762 - RNA, 23 nt, synthetic construct
  modified_base 14: mod_base = OTHER; note = thymine
  misc_feature 1..23: note = Description of Artificial Sequence: Synthetic oligonucleotide
  misc_feature 1..23: note = Description of Combined DNA/RNA Molecule: Synthetic oligonucleotide
  source 1..23: mol_type = other RNA
ttgaagtaaatggtgttaaccag

SEQ ID NO: 763 - RNA, 23 nt, synthetic construct
  misc_feature 1..23: note = Description of Artificial Sequence: Synthetic oligonucleotide
  source 1..23: mol_type = other RNA
ttgaagtaaatggtgttaaccag

SEQ ID NO: 764 - RNA, 23 nt, synthetic construct
  modified_base 16: mod_base = OTHER; note = thymine
  misc_feature 1..23: note = Description of Artificial Sequence: Synthetic oligonucleotide
  misc_feature 1..23: note = Description of Combined DNA/RNA Molecule: Synthetic oligonucleotide
  source 1..23: mol_type = other RNA
ttgaagtaaatggtgttaaccag

SEQ ID NO: 765 - RNA, 23 nt, synthetic construct
  modified_base 17: mod_base = OTHER; note = thymine
  misc_feature 1..23: note = Description of Artificial Sequence: Synthetic oligonucleotide
  misc_feature 1..23: note = Description of Combined DNA/RNA Molecule: Synthetic oligonucleotide
  source 1..23: mol_type = other RNA
ttgaagtaaatggtgttaaccag

SEQ ID NO: 766 - RNA, 23 nt, synthetic construct
  misc_feature 1..23: note = Description of Artificial Sequence: Synthetic oligonucleotide
  source 1..23: mol_type = other RNA
ttgaagtaaatggtgttaaccag

SEQ ID NO: 767 - RNA, 23 nt, synthetic construct
  misc_feature 1..23: note = Description of Artificial Sequence: Synthetic oligonucleotide
  source 1..23: mol_type = other RNA
ttgaagtaaatggtgttaaccag

SEQ ID NO: 768 - RNA, 23 nt, synthetic construct
  misc_feature 1..23: note = Description of Artificial Sequence: Synthetic oligonucleotide
  source 1..23: mol_type = other RNA
ttgaagtaaatggtgttaaccag

SEQ ID NO: 769 - RNA, 23 nt, synthetic construct
  misc_feature 1..23: note = Description of Artificial Sequence: Synthetic oligonucleotide
  source 1..23: mol_type = other RNA
ttgaagtaaatggtgttaaccag

SEQ ID NO: 770 - RNA, 23 nt, synthetic construct
  misc_feature 1..23: note = Description of Artificial Sequence: Synthetic oligonucleotide
  source 1..23: mol_type = other RNA
ttgaagtaaatggtgttaaccag

SEQ ID NO: 771 - RNA, 19 nt, synthetic construct
  modified_base 11: mod_base = OTHER; note = thymine
  misc_feature 1..19: note = Description of Artificial Sequence: Synthetic oligonucleotide
  misc_feature 1..19: note = Description of Combined DNA/RNA Molecule: Synthetic oligonucleotide
  source 1..19: mol_type = other RNA
ttgaagtaaatggtgttaa

SEQ ID NO: 772 - RNA, 23 nt, synthetic construct
  misc_feature 1..23: note = Description of Artificial Sequence: Synthetic oligonucleotide
  source 1..23: mol_type = other RNA
ttgaagtaaatggtgttaaccag

SEQ ID NO: 773 - RNA, 23 nt, synthetic construct
  misc_feature 1..23: note = Description of Artificial Sequence: Synthetic oligonucleotide
  source 1..23: mol_type = other RNA
ttgaagtaaatggtgttaaccag

SEQ ID NO: 774 - RNA, 23 nt, synthetic construct
  misc_feature 1..23: note = Description of Artificial Sequence: Synthetic oligonucleotide
  source 1..23: mol_type = other RNA
ttgaagtaaatggtgttaaccag

SEQ ID NO: 775 - RNA, 23 nt, synthetic construct
  misc_feature 1..23: note = Description of Artificial Sequence: Synthetic oligonucleotide
  source 1..23: mol_type = other RNA
ttgaagtaaatggtgttaaccag

SEQ ID NO: 776 - RNA, 23 nt, synthetic construct
  misc_feature 1..23: note = Description of Artificial Sequence: Synthetic oligonucleotide
  source 1..23: mol_type = other RNA
ttgaagtaaatggtgttaaccag

SEQ ID NO: 777 - RNA, 23 nt, synthetic construct
  misc_feature 1..23: note = Description of Artificial Sequence: Synthetic oligonucleotide
  source 1..23: mol_type = other RNA
ttgaagtaaatggtgttaaccag

SEQ ID NO: 778 - RNA, 23 nt, synthetic construct
  misc_feature 1..23: note = Description of Artificial Sequence: Synthetic oligonucleotide
  source 1..23: mol_type = other RNA
ttgaagtaaatggtgttaaccag

SEQ ID NO: 779 - RNA, 21 nt, synthetic construct
  misc_feature 1..21: note = Description of Artificial Sequence: Synthetic oligonucleotide
  source 1..21: mol_type = other RNA
ggttaacaccatttacttcaa

SEQ ID NO: 780 - RNA, 21 nt, synthetic construct
  misc_feature 1..21: note = Description of Artificial Sequence: Synthetic oligonucleotide
  source 1..21: mol_type = other RNA
ggttaacaccatttacttcaa

SEQ ID NO: 781 - RNA, 21 nt, synthetic construct
  misc_feature 1..21: note = Description of Artificial Sequence: Synthetic oligonucleotide
  source 1..21: mol_type = other RNA
ggttaacaccatttacttcaa

SEQ ID NO: 782 - RNA, 21 nt, synthetic construct
  misc_feature 1..21: note = Description of Artificial Sequence: Synthetic oligonucleotide
  source 1..21: mol_type = other RNA
ggttaacaccatttacttcaa

SEQ ID NO: 783 - RNA, 21 nt, synthetic construct
  misc_feature 1..21: note = Description of Artificial Sequence: Synthetic oligonucleotide
  source 1..21: mol_type = other RNA
ggttaacaccatttacttcaa

SEQ ID NO: 784 - RNA, 21 nt, synthetic construct
  misc_feature 1..21: note = Description of Artificial Sequence: Synthetic oligonucleotide
  source 1..21: mol_type = other RNA
ggttaacaccatttacttcaa

SEQ ID NO: 785 - RNA, 21 nt, synthetic construct
  misc_feature 1..21: note = Description of Artificial Sequence: Synthetic oligonucleotide
  source 1..21: mol_type = other RNA
ggttaacaccatttacttcaa

SEQ ID NO: 786 - RNA, 21 nt, synthetic construct
  misc_feature 1..21: note = Description of Artificial Sequence: Synthetic oligonucleotide
  source 1..21: mol_type = other RNA
ggttaacaccatttacttcaa

SEQ ID NO: 787 - RNA, 21 nt, synthetic construct
  misc_feature 1..21: note = Description of Artificial Sequence: Synthetic oligonucleotide
  source 1..21: mol_type = other RNA
ggttaacaccatttacttcaa

SEQ ID NO: 788 - RNA, 21 nt, synthetic construct
  misc_feature 1..21: note = Description of Artificial Sequence: Synthetic oligonucleotide
  source 1..21: mol_type = other RNA
ggttaacaccatttacttcaa

SEQ ID NO: 789 - RNA, 21 nt, synthetic construct
  misc_feature 1..21: note = Description of Artificial Sequence: Synthetic oligonucleotide
  source 1..21: mol_type = other RNA
ggttaacaccatttacttcaa

SEQ ID NO: 790 - RNA, 21 nt, synthetic construct
  misc_feature 1..21: note = Description of Artificial Sequence: Synthetic oligonucleotide
  source 1..21: mol_type = other RNA
ggttaacaccatttacttcaa

SEQ ID NO: 791 - RNA, 21 nt, synthetic construct
  misc_feature 1..21: note = Description of Artificial Sequence: Synthetic oligonucleotide
  source 1..21: mol_type = other RNA
ggttaacaccatttacttcaa

SEQ ID NO: 792 - RNA, 21 nt, synthetic construct
  misc_feature 1..21: note = Description of Artificial Sequence: Synthetic oligonucleotide
  source 1..21: mol_type = other RNA
ggttaacaccatttacttcaa

SEQ ID NO: 793 - RNA, 21 nt, synthetic construct
  misc_feature 1..21: note = Description of Artificial Sequence: Synthetic oligonucleotide
  source 1..21: mol_type = other RNA
ggttaacaccatttacttcaa

SEQ ID NO: 794 - RNA, 21 nt, synthetic construct
  misc_feature 1..21: note = Description of Artificial Sequence: Synthetic oligonucleotide
  source 1..21: mol_type = other RNA
ggttaacaccatttacttcaa

SEQ ID NO: 795 - RNA, 21 nt, synthetic construct
  modified_base 4: mod_base = OTHER; note = thymine
  modified_base 18: mod_base = OTHER; note = thymine
  misc_feature 1..21: note = Description of Artificial Sequence: Synthetic oligonucleotide
  misc_feature 1..21: note = Description of Combined DNA/RNA Molecule: Synthetic oligonucleotide
  source 1..21: mol_type = other RNA
ggttaacaccatttacttcaa

SEQ ID NO: 796 - RNA, 21 nt, synthetic construct
  modified_base 4: mod_base = OTHER; note = thymine
  modified_base 14: mod_base = OTHER; note = thymine
  modified_base 18: mod_base = OTHER; note = thymine
  misc_feature 1..21: note = Description of Artificial Sequence: Synthetic oligonucleotide
  misc_feature 1..21: note = Description of Combined DNA/RNA Molecule: Synthetic oligonucleotide
  source 1..21: mol_type = other RNA
ggttaacaccatttacttcaa

SEQ ID NO: 797 - RNA, 21 nt, synthetic construct
  modified_base 4: mod_base = OTHER; note = thymine
  modified_base 18: mod_base = OTHER; note = thymine
  misc_feature 1..21: note = Description of Artificial Sequence: Synthetic oligonucleotide
  misc_feature 1..21: note = Description of Combined DNA/RNA Molecule: Synthetic oligonucleotide
  source 1..21: mol_type = other RNA
ggttaacaccatttacttcaa

SEQ ID NO: 798 - RNA, 21 nt, synthetic construct
  modified_base 4: mod_base = OTHER; note = thymine
  modified_base 14: mod_base = OTHER; note = thymine
  modified_base 18: mod_base = OTHER; note = thymine
  misc_feature 1..21: note = Description of Artificial Sequence: Synthetic oligonucleotide
  misc_feature 1..21: note = Description of Combined DNA/RNA Molecule: Synthetic oligonucleotide
  source 1..21: mol_type = other RNA
ggttaacaccatttacttcaa

SEQ ID NO: 799 - RNA, 21 nt, synthetic construct
  modified_base 4: mod_base = OTHER; note = thymine
  modified_base 18: mod_base = OTHER; note = thymine
  misc_feature 1..21: note = Description of Artificial Sequence: Synthetic oligonucleotide
  misc_feature 1..21: note = Description of Combined DNA/RNA Molecule: Synthetic oligonucleotide
  source 1..21: mol_type = other RNA
ggttaacaccatttacttcaa

SEQ ID NO: 800 - RNA, 21 nt, synthetic construct
  modified_base 18: mod_base = OTHER; note = thymine
  misc_feature 1..21: note = Description of Artificial Sequence: Synthetic oligonucleotide
  misc_feature 1..21: note = Description of Combined DNA/RNA Molecule: Synthetic oligonucleotide
  source 1..21: mol_type = other RNA
ggttaacaccatttacttcaa

SEQ ID NO: 801 - RNA, 21 nt, synthetic construct
  modified_base 4: mod_base = OTHER; note = thymine
  modified_base 18: mod_base = OTHER; note = thymine
  misc_feature 1..21: note = Description of Artificial Sequence: Synthetic oligonucleotide
  misc_feature 1..21: note = Description of Combined DNA/RNA Molecule: Synthetic oligonucleotide
  source 1..21: mol_type = other RNA
ggttaacaccatttacttcaa

SEQ ID NO: 802 - RNA, 21 nt, synthetic construct
  misc_feature 1..21: note = Description of Artificial Sequence: Synthetic oligonucleotide
  source 1..21: mol_type = other RNA
ggttaacaccatttacttcaa

SEQ ID NO: 803 - RNA, 21 nt, synthetic construct
  misc_feature 1..21: note = Description of Artificial Sequence: Synthetic oligonucleotide
  source 1..21: mol_type = other RNA
ggttaacaccatttacttcaa

SEQ ID NO: 804 - RNA, 21 nt, synthetic construct
  modified_base 18: mod_base = OTHER; note = thymine
  misc_feature 1..21: note = Description of Artificial Sequence: Synthetic oligonucleotide
  misc_feature 1..21: note = Description of Combined DNA/RNA Molecule: Synthetic oligonucleotide
  source 1..21: mol_type = other RNA
ggttaacaccatttacttcaa

SEQ ID NO: 805 - RNA, 21 nt, synthetic construct
  misc_feature 1..21: note = Description of Artificial Sequence: Synthetic oligonucleotide
  source 1..21: mol_type = other RNA
ggttaacaccatttacttcaa

SEQ ID NO: 806 - RNA, 21 nt, synthetic construct
  misc_feature 1..21: note = Description of Artificial Sequence: Synthetic oligonucleotide
  source 1..21: mol_type = other RNA
ggttaacaccatttacttcaa

SEQ ID NO: 807 - RNA, 21 nt, synthetic construct
  misc_feature 1..21: note = Description of Artificial Sequence: Synthetic oligonucleotide
  source 1..21: mol_type = other RNA
ggttaacaccatttacttcaa

SEQ ID NO: 808 - RNA, 21 nt, synthetic construct
  misc_feature 1..21: note = Description of Artificial Sequence: Synthetic oligonucleotide
  source 1..21: mol_type = other RNA
ggttaacaccatttacttcaa

SEQ ID NO: 809 - RNA, 23 nt, synthetic construct
  misc_feature 1..23: note = Description of Artificial Sequence: Synthetic oligonucleotide
  source 1..23: mol_type = other RNA
ttgaagtaaatggtgttaaccag

SEQ ID NO: 810 - RNA, 23 nt, synthetic construct
  misc_feature 1..23: note = Description of Artificial Sequence: Synthetic oligonucleotide
  source 1..23: mol_type = other RNA
ttgaagtaaatggtgttaaccag

SEQ ID NO: 811 - RNA, 23 nt, synthetic construct
  misc_feature 1..23: note = Description of Artificial Sequence: Synthetic oligonucleotide
  source 1..23: mol_type = other RNA
ttgaagtaaatggtgttaaccag

SEQ ID NO: 812 - RNA, 23 nt, synthetic construct
  misc_feature 1..23: note = Description of Artificial Sequence: Synthetic oligonucleotide
  source 1..23: mol_type = other RNA
ttgaagtaaatggtgttaaccag

SEQ ID NO: 813 - RNA, 23 nt, synthetic construct
  misc_feature 1..23: note = Description of Artificial Sequence: Synthetic oligonucleotide
  source 1..23: mol_type = other RNA
ttgaagtaaatggtgttaaccag

SEQ ID NO: 814 - RNA, 23 nt, synthetic construct
  misc_feature 1..23: note = Description of Artificial Sequence: Synthetic oligonucleotide
  source 1..23: mol_type = other RNA
ttgaagtaaatggtgttaaccag

SEQ ID NO: 815 - RNA, 23 nt, synthetic construct
  misc_feature 1..23: note = Description of Artificial Sequence: Synthetic oligonucleotide
  source 1..23: mol_type = other RNA
ttgaagtaaatggtgttaaccag

SEQ ID NO: 816 - RNA, 23 nt, synthetic construct
  misc_feature 1..23: note = Description of Artificial Sequence: Synthetic oligonucleotide
  source 1..23: mol_type = other RNA
ttgaagtaaatggtgttaaccag

SEQ ID NO: 817 - RNA, 23 nt, synthetic construct
  misc_feature 1..23: note = Description of Artificial Sequence: Synthetic oligonucleotide
  source 1..23: mol_type = other RNA
ttgaagtaaatggtgttaaccag

SEQ ID NO: 818 - RNA, 23 nt, synthetic construct
  misc_feature 1..23: note = Description of Artificial Sequence: Synthetic oligonucleotide
  source 1..23: mol_type = other RNA
ttgaagtaaatggtgttaaccag

SEQ ID NO: 819 - RNA, 23 nt, synthetic construct
  misc_feature 1..23: note = Description of Artificial Sequence: Synthetic oligonucleotide
  source 1..23: mol_type = other RNA
ttgaagtaaatggtgttaaccag

SEQ ID NO: 820 - RNA, 23 nt, synthetic construct
  misc_feature 1..23: note = Description of Artificial Sequence: Synthetic oligonucleotide
  source 1..23: mol_type = other RNA
ttgaagtaaatggtgttaaccag

SEQ ID NO: 821 - RNA, 23 nt, synthetic construct
  misc_feature 1..23: note = Description of Artificial Sequence: Synthetic oligonucleotide
  source 1..23: mol_type = other RNA
ttgaagtaaatggtgttaaccag

SEQ ID NO: 822 - RNA, 23 nt, synthetic construct
  misc_feature 1..23: note = Description of Artificial Sequence: Synthetic oligonucleotide
  source 1..23: mol_type = other RNA
ttgaagtaaatggtgttaaccag

SEQ ID NO: 823 - RNA, 21 nt, synthetic construct
  misc_feature 1..21: note = Description of Artificial Sequence: Synthetic oligonucleotide
  source 1..21: mol_type = other RNA
ttgaagtaaatggtgttaacc

SEQ ID NO: 824 - RNA, 23 nt, synthetic construct
  misc_feature 1..23: note = Description of Artificial Sequence: Synthetic oligonucleotide
  source 1..23: mol_type = other RNA
ttgaagtaaatggtgttaaccag

SEQ ID NO: 825 - RNA, 23 nt, synthetic construct
  misc_feature 1..23: note = Description of Artificial Sequence: Synthetic oligonucleotide
  source 1..23: mol_type = other RNA
ttgaagtaaatggtgttaaccag

SEQ ID NO: 826 - RNA, 23 nt, synthetic construct
  misc_feature 1..23: note = Description of Artificial Sequence: Synthetic oligonucleotide
  source 1..23: mol_type = other RNA
ttgaagtaaatggtgttaaccag

SEQ ID NO: 827 - RNA, 23 nt, synthetic construct
  misc_feature 1..23: note = Description of Artificial Sequence: Synthetic oligonucleotide
  source 1..23: mol_type = other RNA
ttgaagtaaatggtgttaaccag

SEQ ID NO: 828 - RNA, 23 nt, synthetic construct
  misc_feature 1..23: note = Description of Artificial Sequence: Synthetic oligonucleotide
  source 1..23: mol_type = other RNA
ttgaagtaaatggtgttaaccag

SEQ ID NO: 829 - RNA, 23 nt, synthetic construct
  misc_feature 1..23: note = Description of Artificial Sequence: Synthetic oligonucleotide
  source 1..23: mol_type = other RNA
ttgaagtaaatggtgttaaccag

SEQ ID NO: 830 - RNA, 23 nt, synthetic construct
  misc_feature 1..23: note = Description of Artificial Sequence: Synthetic oligonucleotide
  source 1..23: mol_type = other RNA
ttgaagtaaatggtgttaaccag

SEQ ID NO: 831 - RNA, 23 nt, synthetic construct
  misc_feature 1..23: note = Description of Artificial Sequence: Synthetic oligonucleotide
  source 1..23: mol_type = other RNA
ttgaagtaaatggtgttaaccag

SEQ ID NO: 832 - RNA, 23 nt, synthetic construct
  misc_feature 1..23: note = Description of Artificial Sequence: Synthetic oligonucleotide
  source 1..23: mol_type = other RNA
ttgaagtaaatggtgttaaccag

SEQ ID NO: 833 - RNA, 23 nt, synthetic construct
  misc_feature 1..23: note = Description of Artificial Sequence: Synthetic oligonucleotide
  source 1..23: mol_type = other RNA
ttgaagtaaatggtgttaaccag

SEQ ID NO: 834 - RNA, 23 nt, synthetic construct
  misc_feature 1..23: note = Description of Artificial Sequence: Synthetic oligonucleotide
  source 1..23: mol_type = other RNA
ttgaagtaaatggtgttaaccag

SEQ ID NO: 835 - RNA, 23 nt, synthetic construct
  misc_feature 1..23: note = Description of Artificial Sequence: Synthetic oligonucleotide
  source 1..23: mol_type = other RNA
ttgaagtaaatggtgttaaccag

SEQ ID NO: 836 - RNA, 23 nt, synthetic construct
  misc_feature 1..23: note = Description of Artificial Sequence: Synthetic oligonucleotide
  source 1..23: mol_type = other RNA
ttgaagtaaatggtgttaaccag

SEQ ID NO: 837 - RNA, 23 nt, synthetic construct
  misc_feature 1..23: note = Description of Artificial Sequence: Synthetic oligonucleotide
  source 1..23: mol_type = other RNA
ttgaagtaaatggtgttaaccag

SEQ ID NO: 838 - RNA, 23 nt, synthetic construct
  misc_feature 1..23: note = Description of Artificial Sequence: Synthetic oligonucleotide
  source 1..23: mol_type = other RNA
ttgaagtaaatggtgttaaccag

SEQ ID NO: 839 - RNA, 21 nt, synthetic construct
  misc_feature 1..21: note = Description of Artificial Sequence: Synthetic oligonucleotide
  source 1..21: mol_type = other RNA
ggttaacaccatttacttcaa

SEQ ID NO: 840 - RNA, 21 nt, synthetic construct
  modified_base 18: mod_base = OTHER; note = thymine
  misc_feature 1..21: note = Description of Artificial Sequence: Synthetic oligonucleotide
  misc_feature 1..21: note = Description of Combined DNA/RNA Molecule: Synthetic oligonucleotide
  source 1..21: mol_type = other RNA
ggttaacaccatttacttcaa

SEQ ID NO: 841 - RNA, 21 nt, synthetic construct
  modified_base 4: mod_base = OTHER; note = thymine
  modified_base 14: mod_base = OTHER; note = thymine
  modified_base 18: mod_base = OTHER; note = thymine
  misc_feature 1..21: note = Description of Artificial Sequence: Synthetic oligonucleotide
  misc_feature 1..21: note = Description of Combined DNA/RNA Molecule: Synthetic oligonucleotide
  source 1..21: mol_type = other RNA
ggttaacaccatttacttcaa

SEQ ID NO: 842 - RNA, 21 nt, synthetic construct
  misc_feature 1..21: note = Description of Artificial Sequence: Synthetic oligonucleotide
  source 1..21: mol_type = other RNA
ggttaacaccatttacttcaa

SEQ ID NO: 843 - RNA, 21 nt, synthetic construct
  misc_feature 1..21: note = Description of Artificial Sequence: Synthetic oligonucleotide
  source 1..21: mol_type = other RNA
ggttaacaccatttacttcaa

SEQ ID NO: 844 - RNA, 21 nt, synthetic construct
  modified_base 4: mod_base = OTHER; note = thymine
  modified_base 18: mod_base = OTHER; note = thymine
  misc_feature 1..21: note = Description of Artificial Sequence: Synthetic oligonucleotide
  misc_feature 1..21: note = Description of Combined DNA/RNA Molecule: Synthetic oligonucleotide
  source 1..21: mol_type = other RNA
ggttaacaccatttacttcaa

SEQ ID NO: 845 - RNA, 21 nt, synthetic construct
  misc_feature 1..21: note = Description of Artificial Sequence: Synthetic oligonucleotide
  source 1..21: mol_type = other RNA
ggttaacaccatttacttcaa

SEQ ID NO: 846 - RNA, 21 nt, synthetic construct
  misc_feature 1..21: note = Description of Artificial Sequence: Synthetic oligonucleotide
  source 1..21: mol_type = other RNA
ggttaacaccatttacttcaa

SEQ ID NO: 847 - RNA, 21 nt, synthetic construct
  modified_base 4: mod_base = OTHER; note = thymine
  modified_base 14: mod_base = OTHER; note = thymine
  modified_base 18: mod_base = OTHER; note = thymine
  misc_feature 1..21: note = Description of Artificial Sequence: Synthetic oligonucleotide
  misc_feature 1..21: note = Description of Combined DNA/RNA Molecule: Synthetic oligonucleotide
  source 1..21: mol_type = other RNA
ggttaacaccatttacttcaa

SEQ ID NO: 848 - RNA, 21 nt, synthetic construct
  misc_feature 1..21: note = Description of Artificial Sequence: Synthetic oligonucleotide
  source 1..21: mol_type = other RNA
ggttaacaccatttacttcaa

SEQ ID NO: 849 - RNA, 21 nt, synthetic construct
  misc_feature 1..21: note = Description of Artificial Sequence: Synthetic oligonucleotide
  source 1..21: mol_type = other RNA
ggttaacaccatttacttcaa

SEQ ID NO: 850 - RNA, 21 nt, synthetic construct
  modified_base 4: mod_base = OTHER; note = thymine
  modified_base 18: mod_base = OTHER; note = thymine
  misc_feature 1..21: note = Description of Artificial Sequence: Synthetic oligonucleotide
  misc_feature 1..21: note = Description of Combined DNA/RNA Molecule: Synthetic oligonucleotide
  source 1..21: mol_type = other RNA
ggttaacaccatttacttcaa

SEQ ID NO: 851 - RNA, 21 nt, synthetic construct
  misc_feature 1..21: note = Description of Artificial Sequence: Synthetic oligonucleotide
  source 1..21: mol_type = other RNA
ggttaacaccatttacttcaa

SEQ ID NO: 852 - RNA, 21 nt, synthetic construct
  misc_feature 1..21: note = Description of Artificial Sequence: Synthetic oligonucleotide
  source 1..21: mol_type = other RNA
ggttaacaccatttacttcaa

SEQ ID NO: 853 - RNA, 21 nt, synthetic construct
  modified_base 18: mod_base = OTHER; note = thymine
  misc_feature 1..21: note = Description of Artificial Sequence: Synthetic oligonucleotide
  misc_feature 1..21: note = Description of Combined DNA/RNA Molecule: Synthetic oligonucleotide
  source 1..21: mol_type = other RNA
ggttaacaccatttacttcaa

SEQ ID NO: 854 - RNA, 21 nt, synthetic construct
  modified_base 4: mod_base = OTHER; note = thymine
  modified_base 18: mod_base = OTHER; note = thymine
  misc_feature 1..21: note = Description of Artificial Sequence: Synthetic oligonucleotide
  misc_feature 1..21: note = Description of Combined DNA/RNA Molecule: Synthetic oligonucleotide
  source 1..21: mol_type = other RNA
ggttaacaccatttacttcaa

SEQ ID NO: 855 - RNA, 21 nt, synthetic construct
  misc_feature 1..21: note = Description of Artificial Sequence: Synthetic oligonucleotide
  source 1..21: mol_type = other RNA
ggttaacaccatttacttcaa

SEQ ID NO: 856 - RNA, 21 nt, synthetic construct
  misc_feature 1..21: note = Description of Artificial Sequence: Synthetic oligonucleotide
  source 1..21: mol_type = other RNA
ggttaacaccatttacttcaa

SEQ ID NO: 857 - RNA, 21 nt, synthetic construct
  misc_feature 1..21: note = Description of Artificial Sequence: Synthetic oligonucleotide
  source 1..21: mol_type = other RNA
ggttaacaccatttacttcaa

SEQ ID NO: 858 - RNA, 21 nt, synthetic construct
  misc_feature 1..21: note = Description of Artificial Sequence: Synthetic oligonucleotide
  source 1..21: mol_type = other RNA
ggttaacaccatttacttcaa

SEQ ID NO: 859 - RNA, 21 nt, synthetic construct
  misc_feature 1..21: note = Description of Artificial Sequence: Synthetic oligonucleotide
  source 1..21: mol_type = other RNA
ggttaacaccatttacttcaa

SEQ ID NO: 860 - RNA, 21 nt, synthetic construct
  misc_feature 1..21: note = Description of Artificial Sequence: Synthetic oligonucleotide
  source 1..21: mol_type = other RNA
ggttaacaccatttacttcaa

SEQ ID NO: 861 - RNA, 21 nt, synthetic construct
  misc_feature 1..21: note = Description of Artificial Sequence: Synthetic oligonucleotide
  source 1..21: mol_type = other RNA
ggttaacaccatttacttcaa

SEQ ID NO: 862 - RNA, 21 nt, synthetic construct
  misc_feature 1..21: note = Description of Artificial Sequence: Synthetic oligonucleotide
  source 1..21: mol_type = other RNA
ggttaacaccatttacttcaa

SEQ ID NO: 863 - RNA, 21 nt, synthetic construct
  misc_feature 1..21: note = Description of Artificial Sequence: Synthetic oligonucleotide
  source 1..21: mol_type = other RNA
ggttaacaccatttacttcaa

SEQ ID NO: 864 - RNA, 21 nt, synthetic construct
  misc_feature 1..21: note = Description of Artificial Sequence: Synthetic oligonucleotide
  source 1..21: mol_type = other RNA
ggttaacaccatttacttcaa

SEQ ID NO: 865 - RNA, 21 nt, synthetic construct
  misc_feature 1..21: note = Description of Artificial Sequence: Synthetic oligonucleotide
  source 1..21: mol_type = other RNA
ggttaacaccatttacttcaa

SEQ ID NO: 866 - RNA, 21 nt, synthetic construct
  misc_feature 1..21: note = Description of Artificial Sequence: Synthetic oligonucleotide
  source 1..21: mol_type = other RNA
ggttaacaccatttacttcaa

SEQ ID NO: 867 - RNA, 21 nt, synthetic construct
  modified_base 4: mod_base = OTHER; note = thymine
  modified_base 18: mod_base = OTHER; note = thymine
  misc_feature 1..21: note = Description of Artificial Sequence: Synthetic oligonucleotide
  misc_feature 1..21: note = Description of Combined DNA/RNA Molecule: Synthetic oligonucleotide
  source 1..21: mol_type = other RNA
ggttaacaccatttacttcaa

SEQ ID NO: 868 - RNA, 21 nt, synthetic construct
  misc_feature 1..21: note = Description of Artificial Sequence: Synthetic oligonucleotide
  source 1..21: mol_type = other RNA
ggttaacaccatttacttcaa

SEQ ID NO: 869 - RNA, 23 nt, synthetic construct
  misc_feature 1..23: note = Description of Artificial Sequence: Synthetic oligonucleotide
  source 1..23: mol_type = other RNA
ttgaagtaaatggtgttaaccag

SEQ ID NO: 870 - RNA, 23 nt, synthetic construct
  misc_feature 1..23: note = Description of Artificial Sequence: Synthetic oligonucleotide
  source 1..23: mol_type = other RNA
ttgaagtaaatggtgttaaccag

SEQ ID NO: 871 - RNA, 23 nt, synthetic construct
  misc_feature 1..23: note = Description of Artificial Sequence: Synthetic oligonucleotide
  source 1..23: mol_type = other RNA
ttgaagtaaatggtgttaaccag

SEQ ID NO: 872 - RNA, 23 nt, synthetic construct
  misc_feature 1..23: note = Description of Artificial Sequence: Synthetic oligonucleotide
  source 1..23: mol_type = other RNA
ttgaagtaaatggtgttaaccag

SEQ ID NO: 873 - RNA, 23 nt, synthetic construct
  misc_feature 1..23: note = Description of Artificial Sequence: Synthetic oligonucleotide
  source 1..23: mol_type = other RNA
ttgaagtaaatggtgttaaccag

SEQ ID NO: 874 - RNA, 23 nt, synthetic construct
  misc_feature 1..23: note = Description of Artificial Sequence: Synthetic oligonucleotide
  source 1..23: mol_type = other RNA
ttgaagtaaatggtgttaaccag

SEQ ID NO: 875 - RNA, 23 nt, synthetic construct
  misc_feature 1..23: note = Description of Artificial Sequence: Synthetic oligonucleotide
  source 1..23: mol_type = other RNA
ttgaagtaaatggtgttaaccag

SEQ ID NO: 876 - RNA, 23 nt, synthetic construct
  misc_feature 1..23: note = Description of Artificial Sequence: Synthetic oligonucleotide
  source 1..23: mol_type = other RNA
ttgaagtaaatggtgttaaccag

SEQ ID NO: 877 - RNA, 23 nt, synthetic construct
  misc_feature 1..23: note = Description of Artificial Sequence: Synthetic oligonucleotide
  source 1..23: mol_type = other RNA
ttgaagtaaatggtgttaaccag

SEQ ID NO: 878 - RNA, 23 nt, synthetic construct
  misc_feature 1..23: note = Description of Artificial Sequence: Synthetic oligonucleotide
  source 1..23: mol_type = other RNA
ttgaagtaaatggtgttaaccag

SEQ ID NO: 879 - RNA, 23 nt, synthetic construct
  misc_feature 1..23: note = Description of Artificial Sequence: Synthetic oligonucleotide
  source 1..23: mol_type = other RNA
ttgaagtaaatggtgttaaccag

SEQ ID NO: 880 - RNA, 23 nt, synthetic construct
  misc_feature 1..23: note = Description of Artificial Sequence: Synthetic oligonucleotide
  source 1..23: mol_type = other RNA
ttgaagtaaatggtgttaaccag

SEQ ID NO: 881 - RNA, 23 nt, synthetic construct
  misc_feature 1..23: note = Description of Artificial Sequence: Synthetic oligonucleotide
  source 1..23: mol_type = other RNA
ttgaagtaaatggtgttaaccag

SEQ ID NO: 882 - RNA, 23 nt, synthetic construct
  misc_feature 1..23: note = Description of Artificial Sequence: Synthetic oligonucleotide
  source 1..23: mol_type = other RNA
ttgaagtaaatggtgttaaccag

SEQ ID NO: 883 - RNA, 23 nt, synthetic construct
  misc_feature 1..23: note = Description of Artificial Sequence: Synthetic oligonucleotide
  source 1..23: mol_type = other RNA
ttgaagtaaatggtgttaaccag

SEQ ID NO: 884 - RNA, 23 nt, synthetic construct
  misc_feature 1..23: note = Description of Artificial Sequence: Synthetic oligonucleotide
  source 1..23: mol_type = other RNA
ttgaagtaaatggtgttaaccag

SEQ ID NO: 885 - RNA, 23 nt, synthetic construct
  misc_feature 1..23: note = Description of Artificial Sequence: Synthetic oligonucleotide
  source 1..23: mol_type = other RNA
ttgaagtaaatggtgttaaccag

SEQ ID NO: 886 - RNA, 23 nt, synthetic construct
  misc_feature 1..23: note = Description of Artificial Sequence: Synthetic oligonucleotide
  source 1..23: mol_type = other RNA
ttgaagtaaatggtgttaaccag

SEQ ID NO: 887 - RNA, 23 nt, synthetic construct
  misc_feature 1..23: note = Description of Artificial Sequence: Synthetic oligonucleotide
  source 1..23: mol_type = other RNA
ttgaagtaaatggtgttaaccag

SEQ ID NO: 888 - RNA, 23 nt, synthetic construct
  misc_feature 1..23: note = Description of Artificial Sequence: Synthetic oligonucleotide
  source 1..23: mol_type = other RNA
ttgaagtaaatggtgttaaccag

SEQ ID NO: 889 - RNA, 23 nt, synthetic construct
  misc_feature 1..23: note = Description of Artificial Sequence: Synthetic oligonucleotide
  source 1..23: mol_type = other RNA
ttgaagtaaatggtgttaaccag

SEQ ID NO: 890 - RNA, 23 nt, synthetic construct
  misc_feature 1..23: note = Description of Artificial Sequence: Synthetic oligonucleotide
  source 1..23: mol_type = other RNA
ttgaagtaaatggtgttaaccag

SEQ ID NO: 891 - RNA, 23 nt, synthetic construct
  misc_feature 1..23: note = Description of Artificial Sequence: Synthetic oligonucleotide
  source 1..23: mol_type = other RNA
ttgaagtaaatggtgttaaccag

SEQ ID NO: 892 - RNA, 23 nt, synthetic construct
  misc_feature 1..23: note = Description of Artificial Sequence: Synthetic oligonucleotide
  source 1..23: mol_type = other RNA
ttgaagtaaatggtgttaaccag

SEQ ID NO: 893 - RNA, 23 nt, synthetic construct
  misc_feature 1..23: note = Description of Artificial Sequence: Synthetic oligonucleotide
  source 1..23: mol_type = other RNA
ttgaagtaaatggtgttaaccag

SEQ ID NO: 894 - RNA, 23 nt, synthetic construct
  misc_feature 1..23: note = Description of Artificial Sequence: Synthetic oligonucleotide
  source 1..23: mol_type = other RNA
ttgaagtaaatggtgttaaccag

SEQ ID NO: 895 - RNA, 23 nt, synthetic construct
  misc_feature 1..23: note = Description of Artificial Sequence: Synthetic oligonucleotide
  source 1..23: mol_type = other RNA
ttgaagtaaatggtgttaaccag

SEQ ID NO: 896 - RNA, 21 nt, synthetic construct
  misc_feature 1..21: note = Description of Artificial Sequence: Synthetic oligonucleotide
  source 1..21: mol_type = other RNA
ttgaagtaaatggtgttaacc

SEQ ID NO: 897 - RNA, 23 nt, synthetic construct
  misc_feature 1..23: note = Description of Artificial Sequence: Synthetic oligonucleotide
  source 1..23: mol_type = other RNA
ttgaagtaaatggtgttaaccag

SEQ ID NO: 898 - RNA, 23 nt, synthetic construct
  misc_feature 1..23: note = Description of Artificial Sequence: Synthetic oligonucleotide
  source 1..23: mol_type = other RNA
ttgaagtaaatggtgttaaccag

SEQ ID NO: 899 - RNA, 21 nt, synthetic construct
  misc_feature 1..21: note = Description of Artificial Sequence: Synthetic oligonucleotide
  source 1..21: mol_type = other RNA
ggttaacaccatttacttcaa

SEQ ID NO: 900 - RNA, 21 nt, synthetic construct
  misc_feature 1..21: note = Description of Artificial Sequence: Synthetic oligonucleotide
  source 1..21: mol_type = other RNA
ggttaacaccatttacttcaa

SEQ ID NO: 901 - RNA, 21 nt, synthetic construct
  modified_base 4: mod_base = OTHER; note = thymine
  modified_base 14: mod_base = OTHER; note = thymine
  modified_base 18: mod_base = OTHER; note = thymine
  misc_feature 1..21: note = Description of Artificial Sequence: Synthetic oligonucleotide
  misc_feature 1..21: note = Description of Combined DNA/RNA Molecule: Synthetic oligonucleotide
  source 1..21: mol_type = other RNA
ggttaacaccatttacttcaa

SEQ ID NO: 902 - RNA, 21 nt, synthetic construct
  misc_feature 1..21: note = Description of Artificial Sequence: Synthetic oligonucleotide
  source 1..21: mol_type = other RNA
ggttaacaccatttacttcaa

SEQ ID NO: 903 - RNA, 21 nt, synthetic construct
  modified_base 18: mod_base = OTHER; note = thymine
  misc_feature 1..21: note = Description of Artificial Sequence: Synthetic oligonucleotide
  misc_feature 1..21: note = Description of Combined DNA/RNA Molecule: Synthetic oligonucleotide
  source 1..21: mol_type = other RNA
ggttaacaccatttacttcaa

SEQ ID NO: 904 - RNA, 21 nt, synthetic construct
  modified_base 4: mod_base = OTHER; note = thymine
  modified_base 18: mod_base = OTHER; note = thymine
  misc_feature 1..21: note = Description of Artificial Sequence: Synthetic oligonucleotide
  misc_feature 1..21: note = Description of Combined DNA/RNA Molecule: Synthetic oligonucleotide
  source 1..21: mol_type = other RNA
ggttaacaccatttacttcaa

SEQ ID NO: 905 - RNA, 21 nt, synthetic construct
  modified_base 4: mod_base = OTHER; note = thymine
  modified_base 14: mod_base = OTHER; note = thymine
  modified_base 18: mod_base = OTHER; note = thymine
  misc_feature 1..21: note = Description of Artificial Sequence: Synthetic oligonucleotide
  misc_feature 1..21: note = Description of Combined DNA/RNA Molecule: Synthetic oligonucleotide
  source 1..21: mol_type = other RNA
ggttaacaccatttacttcaa

SEQ ID NO: 906 - RNA, 21 nt, synthetic construct
  misc_feature 1..21: note = Description of Artificial Sequence: Synthetic oligonucleotide
  source 1..21: mol_type = other RNA
ggttaacaccatttacttcaa

SEQ ID NO: 907 - RNA, 21 nt, synthetic construct
  modified_base 4: mod_base = OTHER; note = thymine
  modified_base 18: mod_base = OTHER; note = thymine
  misc_feature 1..21: note = Description of Artificial Sequence: Synthetic oligonucleotide
  misc_feature 1..21: note = Description of Combined DNA/RNA Molecule: Synthetic oligonucleotide
  source 1..21: mol_type = other RNA
ggttaacaccatttacttcaa

SEQ ID NO: 908 - RNA, 21 nt, synthetic construct
  misc_feature 1..21: note = Description of Artificial Sequence: Synthetic oligonucleotide
  source 1..21: mol_type = other RNA
ggttaacaccatttacttcaa

SEQ ID NO: 909 - RNA, 21 nt, synthetic construct
  misc_feature 1..21: note = Description of Artificial Sequence: Synthetic oligonucleotide
  source 1..21: mol_type = other RNA
ggttaacaccatttacttcaa

SEQ ID NO: 910 - RNA, 21 nt, synthetic construct
  modified_base 4: mod_base = OTHER; note = thymine
  modified_base 18: mod_base = OTHER; note = thymine
  misc_feature 1..21: note = Description of Artificial Sequence: Synthetic oligonucleotide
  misc_feature 1..21: note = Description of Combined DNA/RNA Molecule: Synthetic oligonucleotide
  source 1..21: mol_type = other RNA
ggttaacaccatttacttcaa

SEQ ID NO: 911 - RNA, 21 nt, synthetic construct
  modified_base 18: mod_base = OTHER; note = thymine
  misc_feature 1..21: note = Description of Artificial Sequence: Synthetic oligonucleotide
  misc_feature 1..21: note = Description of Combined DNA/RNA Molecule: Synthetic oligonucleotide
  source 1..21: mol_type = other RNA
ggttaacaccatttacttcaa

SEQ ID NO: 912 - RNA, 20 nt, synthetic construct
  misc_feature 1..20: note = Description of Artificial Sequence: Synthetic oligonucleotide
  source 1..20: mol_type = other RNA
gttaacaccatttacttcaa

SEQ ID NO: 913 - RNA, 21 nt, synthetic construct
  modified_base 14: mod_base = OTHER; note = thymine
  misc_feature 1..21: note = Description of Artificial Sequence: Synthetic oligonucleotide
  misc_feature 1..21: note = Description of Combined DNA/RNA Molecule: Synthetic oligonucleotide
  source 1..21: mol_type = other RNA
ggttaacaccatttacttcaa

SEQ ID NO: 914 - RNA, 21 nt, synthetic construct
  modified_base 4: mod_base = OTHER; note = thymine
  modified_base 14: mod_base = OTHER; note = thymine
  modified_base 18: mod_base = OTHER; note = thymine
  misc_feature 1..21: note = Description of Artificial Sequence: Synthetic oligonucleotide
  misc_feature 1..21: note = Description of Combined DNA/RNA Molecule: Synthetic oligonucleotide
  source 1..21: mol_type = other RNA
ggttaacaccatttacttcaa

SEQ ID NO: 915 - RNA, 21 nt, synthetic construct
  misc_feature 1..21: note = Description of Artificial Sequence: Synthetic oligonucleotide
  source 1..21: mol_type = other RNA
aactgccgactctatcgaaaa

SEQ ID NO: 916 - RNA, 21 nt, synthetic construct
  modified_base 13: mod_base = OTHER; note = thymine
  modified_base 17: mod_base = OTHER; note = thymine
  misc_feature 1..21: note = Description of Artificial Sequence: Synthetic oligonucleotide
  misc_feature 1..21: note = Description of Combined DNA/RNA Molecule: Synthetic oligonucleotide
  source 1..21: mol_type = other RNA
ggttaacaccatttacttcaa

SEQ ID NO: 917 - RNA, 20 nt, synthetic construct
  misc_feature 1..20: note = Description of Artificial Sequence: Synthetic oligonucleotide
  source 1..20: mol_type = other RNA
gttaacaccatttacttcaa

SEQ ID NO: 918 - RNA, 21 nt, synthetic construct
  misc_feature 1..21: note = Description of Artificial Sequence: Synthetic oligonucleotide
  source 1..21: mol_type = other RNA
ggttaacaccatttacttcaa

SEQ ID NO: 919 - RNA, 21 nt, synthetic construct
  modified_base 4: mod_base = OTHER; note = thymine
  modified_base 18: mod_base = OTHER; note = thymine
  misc_feature 1..21: note = Description of Artificial Sequence: Synthetic oligonucleotide
  misc_feature 1..21: note = Description of Combined DNA/RNA Molecule: Synthetic oligonucleotide
  source 1..21: mol_type = other RNA
ggttaacaccatttacttcaa

SEQ ID NO: 920 - RNA, 23 nt, synthetic construct
  misc_feature 1..23: note = Description of Artificial Sequence: Synthetic oligonucleotide
  source 1..23: mol_type = other RNA
ttgaagtaaatggtgttaaccag

SEQ ID NO: 921 - RNA, 23 nt, synthetic construct
  misc_feature 1..23: note = Description of Artificial Sequence: Synthetic oligonucleotide
  source 1..23: mol_type = other RNA
ttgaagtaaatggtgttaaccag

SEQ ID NO: 922 - RNA, 23 nt, synthetic construct
  misc_feature 1..23: note = Description of Artificial Sequence: Synthetic oligonucleotide
  source 1..23: mol_type = other RNA
ttgaagtaaatggtgttaaccag

SEQ ID NO: 923 - RNA, 23 nt, synthetic construct
  misc_feature 1..23: note = Description of Artificial Sequence: Synthetic oligonucleotide
  source 1..23: mol_type = other RNA
ttgaagtaaatggtgttaaccag

SEQ ID NO: 924 - RNA, 23 nt, synthetic construct
  misc_feature 1..23: note = Description of Artificial Sequence: Synthetic oligonucleotide
  source 1..23: mol_type = other RNA
ttgaagtaaatggtgttaaccag

SEQ ID NO: 925 - RNA, 23 nt, synthetic construct
  misc_feature 1..23: note = Description of Artificial Sequence: Synthetic oligonucleotide
  source 1..23: mol_type = other RNA
ttgaagtaaatggtgttaaccag

SEQ ID NO: 926 - RNA, 23 nt, synthetic construct
  misc_feature 1..23: note = Description of Artificial Sequence: Synthetic oligonucleotide
  source 1..23: mol_type = other RNA
ttgaagtaaatggtgttaaccag

SEQ ID NO: 927 - RNA, 23 nt, synthetic construct
  misc_feature 1..23: note = Description of Artificial Sequence: Synthetic oligonucleotide
  source 1..23: mol_type = other RNA
ttgaagtaaatggtgttaaccag

SEQ ID NO: 928 - RNA, 23 nt, synthetic construct
  misc_feature 1..23: note = Description of Artificial Sequence: Synthetic oligonucleotide
  source 1..23: mol_type = other RNA
ttgaagtaaatggtgttaaccag

SEQ ID NO: 929 - RNA, 23 nt, synthetic construct
  misc_feature 1..23: note = Description of Artificial Sequence: Synthetic oligonucleotide
  source 1..23: mol_type = other RNA
ttgaagtaaatggtgttaaccag

SEQ ID NO: 930 - RNA, 23 nt, synthetic construct
  misc_feature 1..23: note = Description of Artificial Sequence: Synthetic oligonucleotide
  source 1..23: mol_type = other RNA
ttgaagtaaatggtgttaaccag

SEQ ID NO: 931 - RNA, 23 nt, synthetic construct
  misc_feature 1..23: note = Description of Artificial Sequence: Synthetic oligonucleotide
  source 1..23: mol_type = other RNA
ttgaagtaaatggtgttaaccag

SEQ ID NO: 932 - RNA, 23 nt, synthetic construct
  misc_feature 1..23: note = Description of Artificial Sequence: Synthetic oligonucleotide
  source 1..23: mol_type = other RNA
ttgaagtaaatggtgttaaccag

SEQ ID NO: 933 - RNA, 22 nt, synthetic construct
  misc_feature 1..22: note = Description of Artificial Sequence: Synthetic oligonucleotide
  source 1..22: mol_type = other RNA
ttgaagtaaatggtgttaacca

SEQ ID NO: 934 - RNA, 23 nt, synthetic construct
  modified_base 2: mod_base = OTHER; note = thymine
  modified_base 7: mod_base = OTHER; note = thymine
  modified_base 14: mod_base = OTHER; note = thymine
  misc_feature 1..23: note = Description of Artificial Sequence: Synthetic oligonucleotide
  misc_feature 1..23: note = Description of Combined DNA/RNA Molecule: Synthetic oligonucleotide
  source 1..23: mol_type = other RNA
ttgaagtaaatggtgttaaccag

SEQ ID NO: 935 - RNA, 23 nt, synthetic construct
  misc_feature 1..23: note = Description of Artificial Sequence: Synthetic oligonucleotide
  source 1..23: mol_type = other RNA
ttgaagtaaatggtgttaaccag

SEQ ID NO: 936 - RNA, 23 nt, synthetic construct
  misc_feature 1..23: note = Description of Artificial Sequence: Synthetic oligonucleotide
  source 1..23: mol_type = other RNA
ttttcgatagagtcggcagttca

SEQ ID NO: 937 - RNA, 23 nt, synthetic construct
  modified_base 2: mod_base = OTHER; note = thymine
  modified_base 7: mod_base = OTHER; note = thymine
  modified_base 14: mod_base = OTHER; note = thymine
  misc_feature 1..23: note = Description of Artificial Sequence: Synthetic oligonucleotide
  misc_feature 1..23: note = Description of Combined DNA/RNA Molecule: Synthetic oligonucleotide
  source 1..23: mol_type = other RNA
ttgaagtaaatggtgttaaccag

SEQ ID NO: 938 - RNA, 22 nt, synthetic construct
  misc_feature 1..22: note = Description of Artificial Sequence: Synthetic oligonucleotide
  source 1..22: mol_type = other RNA
ttgaagtaaatggtgttaacca

SEQ ID NO: 939 - RNA, 23 nt, synthetic construct
  misc_feature 1..23: note = Description of Artificial Sequence: Synthetic oligonucleotide
  source 1..23: mol_type = other RNA
ttgaagtaaatggtgttaaccag

SEQ ID NO: 940 - RNA, 23 nt, synthetic construct
  misc_feature 1..23: note = Description of Artificial Sequence: Synthetic oligonucleotide
  source 1..23: mol_type = other RNA
ttgaagtaaatggtgttaaccag

SEQ ID NO: 941 - RNA, 21 nt, synthetic construct
  misc_feature 1..21: note = Description of Artificial Sequence: Synthetic oligonucleotide
  source 1..21: mol_type = other RNA
ggttaacaccatttacttcaa

SEQ ID NO: 942 - RNA, 21 nt, synthetic construct
  misc_feature 1..21: note = Description of Artificial Sequence: Synthetic oligonucleotide
  source 1..21: mol_type = other RNA
ggttaacaccatttacttcaa

SEQ ID NO: 943 - RNA, 21 nt, synthetic construct
  misc_feature 1..21: note = Description of Artificial Sequence: Synthetic oligonucleotide
  source 1..21: mol_type = other RNA
ggttaacaccatttacttcaa

SEQ ID NO: 944 - RNA, 21 nt, synthetic construct
  misc_feature 1..21: note = Description of Artificial Sequence: Synthetic oligonucleotide
  source 1..21: mol_type = other RNA
ggttaacaccatttacttcaa

SEQ ID NO: 945 - RNA, 21 nt, synthetic construct
  misc_feature 1..21: note = Description of Artificial Sequence: Synthetic oligonucleotide
  source 1..21: mol_type = other RNA
ggttaacaccatttacttcaa

SEQ ID NO: 946 - RNA, 21 nt, synthetic construct
  misc_feature 1..21: note = Description of Artificial Sequence: Synthetic oligonucleotide
  source 1..21: mol_type = other RNA
ggttaacaccatttacttcaa

SEQ ID NO: 947 - RNA, 21 nt, synthetic construct
  modified_base 4: mod_base = OTHER; note = thymine
  modified_base 14: mod_base = OTHER; note = thymine
  modified_base 18: mod_base = OTHER; note = thymine
  misc_feature 1..21: note = Description of Artificial Sequence: Synthetic oligonucleotide
  misc_feature 1..21: note = Description of Combined DNA/RNA Molecule: Synthetic oligonucleotide
  source 1..21: mol_type = other RNA
ggttaacaccatttacttcaa

SEQ ID NO: 948 - RNA, 21 nt, synthetic construct
  misc_feature 1..21: note = Description of Artificial Sequence: Synthetic oligonucleotide
  source 1..21: mol_type = other RNA
ggttaacaccatttacttcaa

SEQ ID NO: 949 - RNA, 21 nt, synthetic construct
  misc_feature 1..21: note = Description of Artificial Sequence: Synthetic oligonucleotide
  source 1..21: mol_type = other RNA
ggttaacaccatttacttcaa

SEQ ID NO: 950 - RNA, 21 nt, synthetic construct
  misc_feature 1..21: note = Description of Artificial Sequence: Synthetic oligonucleotide
  source 1..21: mol_type = other RNA
ggttaacaccatttacttcaa

SEQ ID NO: 951 - RNA, 21 nt, synthetic construct
  misc_feature 1..21: note = Description of Artificial Sequence: Synthetic oligonucleotide
  source 1..21: mol_type = other RNA
ggttaacaccatttacttcaa

SEQ ID NO: 952 - RNA, 21 nt, synthetic construct
  misc_feature 1..21: note = Description of Artificial Sequence: Synthetic oligonucleotide
  source 1..21: mol_type = other RNA
ggttaacaccatttacttcaa

SEQ ID NO: 953 - RNA, 21 nt, synthetic construct
  misc_feature 1..21: note = Description of Artificial Sequence: Synthetic oligonucleotide
  source 1..21: mol_type = other RNA
ggttaacaccatttacttcaa

SEQ ID NO: 954 - RNA, 21 nt, synthetic construct
  modified_base 4: mod_base = OTHER; note = thymine
  modified_base 14: mod_base = OTHER; note = thymine
  modified_base 18: mod_base = OTHER; note = thymine
  misc_feature 1..21: note = Description of Artificial Sequence: Synthetic oligonucleotide
  misc_feature 1..21: note = Description of Combined DNA/RNA Molecule: Synthetic oligonucleotide
  source 1..21: mol_type = other RNA
ggttaacaccatttacttcaa

SEQ ID NO: 955 - RNA, 21 nt, synthetic construct
  misc_feature 1..21: note = Description of Artificial Sequence: Synthetic oligonucleotide
  source 1..21: mol_type = other RNA
ggttaacaccatttacttcaa

SEQ ID NO: 956 - RNA, 21 nt, synthetic construct
  misc_feature 1..21: note = Description of Artificial Sequence: Synthetic oligonucleotide
  source 1..21: mol_type = other RNA
ggttaacaccatttacttcaa

SEQ ID NO: 957 - RNA, 21 nt, synthetic construct
  misc_feature 1..21: note = Description of Artificial Sequence: Synthetic oligonucleotide
  source 1..21: mol_type = other RNA
ggttaacaccatttacttcaa

SEQ ID NO: 958 - RNA, 21 nt, synthetic construct
  misc_feature 1..21: note = Description of Artificial Sequence: Synthetic oligonucleotide
  source 1..21: mol_type = other RNA
ggttaacaccatttacttcaa

SEQ ID NO: 959 - RNA, 21 nt, synthetic construct
  misc_feature 1..21: note = Description of Artificial Sequence: Synthetic oligonucleotide
  source 1..21: mol_type = other RNA
ggttaacaccatttacttcaa

SEQ ID NO: 960 - RNA, 23 nt, synthetic construct
  misc_feature 1..23: note = Description of Artificial Sequence: Synthetic oligonucleotide
  source 1..23: mol_type = other RNA
ttgaagtaaatggtgttaaccag

SEQ ID NO: 961 - RNA, 23 nt, synthetic construct
  misc_feature 1..23: note = Description of Artificial Sequence: Synthetic oligonucleotide
  source 1..23: mol_type = other RNA
ttgaagtaaatggtgttaaccag

SEQ ID NO: 962 - RNA, 23 nt, synthetic construct
  misc_feature 1..23: note = Description of Artificial Sequence: Synthetic oligonucleotide
  source 1..23: mol_type = other RNA
ttgaagtaaatggtgttaaccag

SEQ ID NO: 963 - RNA, 23 nt, synthetic construct
  misc_feature 1..23: note = Description of Artificial Sequence: Synthetic oligonucleotide
  source 1..23: mol_type = other RNA
ttgaagtaaatggtgttaaccag

SEQ ID NO: 964 - RNA, 23 nt, synthetic construct
  misc_feature 1..23: note = Description of Artificial Sequence: Synthetic oligonucleotide
  source 1..23: mol_type = other RNA
ttgaagtaaatggtgttaaccag

SEQ ID NO: 965 - RNA, 23 nt, synthetic construct
  misc_feature 1..23: note = Description of Artificial Sequence: Synthetic oligonucleotide
  source 1..23: mol_type = other RNA
ttgaagtaaatggtgttaaccag

SEQ ID NO: 966 - RNA, 23 nt, synthetic construct
  misc_feature 1..23: note = Description of Artificial Sequence: Synthetic oligonucleotide
  source 1..23: mol_type = other RNA
ttgaagtaaatggtgttaaccag

SEQ ID NO: 967 - RNA, 23 nt, synthetic construct
  misc_feature 1..23: note = Description of Artificial Sequence: Synthetic oligonucleotide
  source 1..23: mol_type = other RNA
ttgaagtaaatggtgttaaccag

SEQ ID NO: 968 - RNA, 23 nt, synthetic construct
  misc_feature 1..23: note = Description of Artificial Sequence: Synthetic oligonucleotide
  source 1..23: mol_type = other RNA
ttgaagtaaatggtgttaaccag

SEQ ID NO: 969 - RNA, 23 nt, synthetic construct
  misc_feature 1..23: note = Description of Artificial Sequence: Synthetic oligonucleotide
  source 1..23: mol_type = other RNA
ttgaagtaaatggtgttaaccag

SEQ ID NO: 970 - RNA, 23 nt, synthetic construct
  misc_feature 1..23: note = Description of Artificial Sequence: Synthetic oligonucleotide
  source 1..23: mol_type = other RNA
ttgaagtaaatggtgttaaccag

SEQ ID NO: 971 - RNA, 23 nt, synthetic construct
  misc_feature 1..23: note = Description of Artificial Sequence: Synthetic oligonucleotide
  source 1..23: mol_type = other RNA
ttgaagtaaatggtgttaaccag

SEQ ID NO: 972 - RNA, 23 nt, synthetic construct
  misc_feature 1..23: note = Description of Artificial Sequence: Synthetic oligonucleotide
  source 1..23: mol_type = other RNA
ttgaagtaaatggtgttaaccag

SEQ ID NO: 973 - RNA, 23 nt, synthetic construct
  misc_feature 1..23: note = Description of Artificial Sequence: Synthetic oligonucleotide
  source 1..23: mol_type = other RNA
ttgaagtaaatggtgttaaccag

SEQ ID NO: 974 - RNA, 23 nt, synthetic construct
  misc_feature 1..23: note = Description of Artificial Sequence: Synthetic oligonucleotide
  source 1..23: mol_type = other RNA
ttgaagtaaatggtgttaaccag

SEQ ID NO: 975 - RNA, 23 nt, synthetic construct
  misc_feature 1..23: note = Description of Artificial Sequence: Synthetic oligonucleotide
  source 1..23: mol_type = other RNA
ttgaagtaaatggtgttaaccag

SEQ ID NO: 976 - RNA, 23 nt, synthetic construct
  misc_feature 1..23: note = Description of Artificial Sequence: Synthetic oligonucleotide
  source 1..23: mol_type = other RNA
ttgaagtaaatggtgttaaccag

SEQ ID NO: 977 - RNA, 23 nt, synthetic construct
  misc_feature 1..23: note = Description of Artificial Sequence: Synthetic oligonucleotide
  source 1..23: mol_type = other RNA
ttgaagtaaatggtgttaaccag

SEQ ID NO: 978 - RNA, 23 nt, synthetic construct
  misc_feature 1..23: note = Description of Artificial Sequence: Synthetic oligonucleotide
  source 1..23: mol_type = other RNA
ttgaagtaaatggtgttaaccag

SEQ ID NO: 979 - RNA, 19 nt, synthetic construct
  misc_feature 1..19: note = Description of Artificial Sequence: Synthetic oligonucleotide
  source 1..19: mol_type = other RNA
ggagaagaaggcaactgag

SEQ ID NO: 980 - RNA, 19 nt, synthetic construct
  misc_feature 1..19: note = Description of Artificial Sequence: Synthetic oligonucleotide
  source 1..19: mol_type = other RNA
tgaccaagctgggtgcctg

SEQ ID NO: 981 - RNA, 19 nt, synthetic construct
  misc_feature 1..19: note = Description of Artificial Sequence: Synthetic oligonucleotide
  source 1..19: mol_type = other RNA
ggttaacaccatttacttc

SEQ ID NO: 982 - RNA, 19 nt, synthetic construct
  misc_feature 1..19: note = Description of Artificial Sequence: Synthetic oligonucleotide
  source 1..19: mol_type = other RNA
gctggttaacaccatttac

SEQ ID NO: 983 - RNA, 19 nt, synthetic construct
  misc_feature 1..19: note = Description of Artificial Sequence: Synthetic oligonucleotide
  source 1..19: mol_type = other RNA
taatgacaccctccagcaa

SEQ ID NO: 984 - RNA, 19 nt, synthetic construct
  misc_feature 1..19: note = Description of Artificial Sequence: Synthetic oligonucleotide
  source 1..19: mol_type = other RNA
cgtgttcagcatctatgat

SEQ ID NO: 985 - RNA, 19 nt, synthetic construct
  misc_feature 1..19: note = Description of Artificial Sequence: Synthetic oligonucleotide
  source 1..19: mol_type = other RNA
ttgaggacggcttcagttt

SEQ ID NO: 986 - RNA, 19 nt, synthetic construct
  misc_feature 1..19: note = Description of Artificial Sequence: Synthetic oligonucleotide
  source 1..19: mol_type = other RNA
cggcgtgtctgggaactgt

SEQ ID NO: 987 - RNA, 19 nt, synthetic construct
  misc_feature 1..19: note = Description of Artificial Sequence: Synthetic oligonucleotide
  source 1..19: mol_type = other RNA
ttaacaccatttacttcaa

SEQ ID NO: 988 - RNA, 19 nt, synthetic construct
  misc_feature 1..19: note = Description of Artificial Sequence: Synthetic oligonucleotide
  source 1..19: mol_type = other RNA
ccctgaaaagtccaaactc

SEQ ID NO: 989 - RNA, 19 nt, synthetic construct
  misc_feature 1..19: note = Description of Artificial Sequence: Synthetic oligonucleotide
  source 1..19: mol_type = other RNA
cgagatgacctctatgtct

SEQ ID NO: 990 - RNA, 19 nt, synthetic construct
  misc_feature 1..19: note = Description of Artificial Sequence: Synthetic oligonucleotide
  source 1..19: mol_type = other RNA
tctacaaggctgatggaga

SEQ ID NO: 991 - RNA, 19 nt, synthetic construct
  misc_feature 1..19: note = Description of Artificial Sequence: Synthetic oligonucleotide
  source 1..19: mol_type = other RNA
agctcactgttctggtgct

SEQ ID NO: 992 - RNA, 19 nt, synthetic construct
  misc_feature 1..19: note = Description of Artificial Sequence: Synthetic oligonucleotide
  source 1..19: mol_type = other RNA
aggagcagctgcaagacat

SEQ ID NO: 993 - RNA, 19 nt, synthetic construct
  misc_feature 1..19: note = Description of Artificial Sequence: Synthetic oligonucleotide
  source 1..19: mol_type = other RNA
gccaccaaccggcgtgtct

SEQ ID NO: 994 - RNA, 19 nt, synthetic construct
  misc_feature 1..19: note = Description of Artificial Sequence: Synthetic oligonucleotide
  source 1..19: mol_type = other RNA
cagaacagaagatcccgga

SEQ ID NO: 995 - RNA, 19 nt, synthetic construct
  misc_feature 1..19: note = Description of Artificial Sequence: Synthetic oligonucleotide
  source 1..19: mol_type = other RNA
ccttgtcgatctgttcagc

SEQ ID NO: 996 - RNA, 19 nt, synthetic construct
  misc_feature 1..19: note = Description of Artificial Sequence: Synthetic oligonucleotide
  source 1..19: mol_type = other RNA
aggcaagttccgttatcgg

SEQ ID NO: 997 - RNA, 19 nt, synthetic construct
  misc_feature 1..19: note = Description of Artificial Sequence: Synthetic oligonucleotide
  source 1..19: mol_type = other RNA
ttttgtccttgctgctcat

SEQ ID NO: 998 - RNA, 19 nt, synthetic construct
  misc_feature 1..19: note = Description of Artificial Sequence: Synthetic oligonucleotide
  source 1..19: mol_type = other RNA
agacctaccaggacatcag

SEQ ID NO: 999 - RNA, 19 nt, synthetic construct
  misc_feature 1..19: note = Description of Artificial Sequence: Synthetic oligonucleotide
  source 1..19: mol_type = other RNA
aactgaactgccgactcta

SEQ ID NO: 1000 - RNA, 19 nt, synthetic construct
  misc_feature 1..19: note = Description of Artificial Sequence: Synthetic oligonucleotide
  source 1..19: mol_type = other RNA
catttacttcaagggcctg

SEQ ID NO: 1001 - RNA, 19 nt, synthetic construct
  misc_feature 1..19: note = Description of Artificial Sequence: Synthetic oligonucleotide
  source 1..19: mol_type = other RNA
ccctggacttcaaggaaaa

SEQ ID NO: 1002 - RNA, 19 nt, synthetic construct
  misc_feature 1..19: note = Description of Artificial Sequence: Synthetic oligonucleotide
  source 1..19: mol_type = other RNA
agctgcaagtaccgctgtt

SEQ ID NO: 1003 - RNA, 19 nt, synthetic construct
  misc_feature 1..19: note = Description of Artificial Sequence: Synthetic oligonucleotide
  source 1..19: mol_type = other RNA
acacaaggaaggaactgtt

SEQ ID NO: 1004 - RNA, 19 nt, synthetic construct
  misc_feature 1..19: note = Description of Artificial Sequence: Synthetic oligonucleotide
  source 1..19: mol_type = other RNA
gcaactgaggatgagggct

SEQ ID NO: 1005 - RNA, 19 nt, synthetic construct
  misc_feature 1..19: note = Description of Artificial Sequence: Synthetic oligonucleotide
  source 1..19: mol_type = other RNA
gtagccaacccttgtgtta

SEQ ID NO: 1006 - RNA, 19 nt, synthetic construct
  misc_feature 1..19: note = Description of Artificial Sequence: Synthetic oligonucleotide
  source 1..19: mol_type = other RNA
gtttgtgaacagaagtaaa

SEQ ID NO: 1007 - RNA, 19 nt, synthetic construct
  misc_feature 1..19: note = Description of Artificial Sequence: Synthetic oligonucleotide
  source 1..19: mol_type = other RNA
gggtgactttcaaggccaa

SEQ ID NO: 1008 - RNA, 19 nt, synthetic construct
  misc_feature 1..19: note = Description of Artificial Sequence: Synthetic oligonucleotide
  source 1..19: mol_type = other RNA
ttatcggcgcgtggctgaa

SEQ ID NO: 1009 - RNA, 19 nt, synthetic construct
  misc_feature 1..19: note = Description of Artificial Sequence: Synthetic oligonucleotide
  source 1..19: mol_type = other RNA
ccacttcttctttgccaaa

SEQ ID NO: 1010 - RNA, 19 nt, synthetic construct
  misc_feature 1..19: note = Description of Artificial Sequence: Synthetic oligonucleotide
  source 1..19: mol_type = other RNA
aacaccatttacttcaagg

SEQ ID NO: 1011 - RNA, 19 nt, synthetic construct
  misc_feature 1..19: note = Description of Artificial Sequence: Synthetic oligonucleotide
  source 1..19: mol_type = other RNA
gatggagagtcgtgttcag

SEQ ID NO: 1012 - RNA, 19 nt, synthetic construct
  misc_feature 1..19: note = Description of Artificial Sequence: Synthetic oligonucleotide
  source 1..19: mol_type = other RNA
caccatttacttcaagggc

SEQ ID NO: 1013 - RNA, 19 nt, synthetic construct
  misc_feature 1..19: note = Description of Artificial Sequence: Synthetic oligonucleotide
  source 1..19: mol_type = other RNA
tttacttcaagggcctgtg

SEQ ID NO: 1014 - RNA, 19 nt, synthetic construct
  misc_feature 1..19: note = Description of Artificial Sequence: Synthetic oligonucleotide
  source 1..19: mol_type = other RNA
taagagaagttcctctgaa

SEQ ID NO: 1015 - RNA, 19 nt, synthetic construct
  misc_feature 1..19: note = Description of Artificial Sequence: Synthetic oligonucleotide
  source 1..19: mol_type = other RNA
gcgggacattcccatgaat

SEQ ID NO: 1016 - RNA, 19 nt, synthetic construct
  misc_feature 1..19: note = Description of Artificial Sequence: Synthetic oligonucleotide
  source 1..19: mol_type = other RNA
tgccccaccctgtcctctg

SEQ ID NO: 1017 - RNA, 19 nt, synthetic construct
  misc_feature 1..19: note = Description of Artificial Sequence: Synthetic oligonucleotide
  source 1..19: mol_type = other RNA
tggttaacaccatttactt

SEQ ID NO: 1018 - RNA, 19 nt, synthetic construct
  misc_feature 1..19: note = Description of Artificial Sequence: Synthetic oligonucleotide
  source 1..19: mol_type = other RNA
cggattgcctcagatcaca

SEQ ID NO: 1019 - RNA, 19 nt, synthetic construct
  misc_feature 1..19: note = Description of Artificial Sequence: Synthetic oligonucleotide
  source 1..19: mol_type = other RNA
ccaggacatcagtgagttg

SEQ ID NO: 1020 - RNA, 19 nt, synthetic construct
  misc_feature 1..19: note = Description of Artificial Sequence: Synthetic oligonucleotide
  source 1..19: mol_type = other RNA
ccagttttcaggcggattg

SEQ ID NO: 1021 - RNA, 19 nt, synthetic construct
  misc_feature 1..19: note = Description of Artificial Sequence: Synthetic oligonucleotide
  source 1..19: mol_type = other RNA
caccatatctgagaaaaca

SEQ ID NO: 1022 - RNA, 19 nt, synthetic construct
  misc_feature 1..19: note = Description of Artificial Sequence: Synthetic oligonucleotide
  source 1..19: mol_type = other RNA
aagtaaaaataaatacaaa

SEQ ID NO: 1023 - RNA, 19 nt, synthetic construct
  misc_feature 1..19: note = Description of Artificial Sequence: Synthetic oligonucleotide
  source 1..19: mol_type = other RNA
gcacccaggtgcttgagtt

SEQ ID NO: 1024 - RNA, 19 nt, synthetic construct
  misc_feature 1..19: note = Description of Artificial Sequence: Synthetic oligonucleotide
  source 1..19: mol_type = other RNA
taacaccatttacttcaag

SEQ ID NO: 1025 - RNA, 19 nt, synthetic construct
  misc_feature 1..19: note = Description of Artificial Sequence: Synthetic oligonucleotide
  source 1..19: mol_type = other RNA
ccttcaaaggtgatgacat

SEQ ID NO: 1026 - RNA, 19 nt, synthetic construct
  misc_feature 1..19: note = Description of Artificial Sequence: Synthetic oligonucleotide
  source 1..19: mol_type = other RNA
caaggccaattcccgcttt

SEQ ID NO: 1027 - RNA, 19 nt, synthetic construct
  misc_feature 1..19: note = Description of Artificial Sequence: Synthetic oligonucleotide
  source 1..19: mol_type = other RNA
tcagtttgaaggagcagct

SEQ ID NO: 1028 - RNA, 19 nt, synthetic construct
  misc_feature 1..19: note = Description of Artificial Sequence: Synthetic oligonucleotide
  source 1..19: mol_type = other RNA
gggactgcgtgacctgtca

SEQ ID NO: 1029 - RNA, 19 nt, synthetic construct
  misc_feature 1..19: note = Description of Artificial Sequence: Synthetic oligonucleotide
  source 1..19: mol_type = other RNA
tcagccaatcgcctttttg

SEQ ID NO: 1030 - RNA, 19 nt, synthetic construct
  misc_feature 1..19: note = Description of Artificial Sequence: Synthetic oligonucleotide
  source 1..19: mol_type = other RNA
cctcggaagccatcaatga

SEQ ID NO: 1031 - RNA, 19 nt, synthetic construct
  misc_feature 1..19: note = Description of Artificial Sequence: Synthetic oligonucleotide
  source 1..19: mol_type = other RNA
gacaatgataacattttcc

SEQ ID NO: 1032 - RNA, 19 nt, synthetic construct
  misc_feature 1..19: note = Description of Artificial Sequence: Synthetic oligonucleotide
  source 1..19: mol_type = other RNA
cttattctttgcacctctt

SEQ ID NO: 1033 - RNA, 19 nt, synthetic construct
  misc_feature 1..19: note = Description of Artificial Sequence: Synthetic oligonucleotide
  source 1..19: mol_type = other RNA
attgctggccgttcgctaa

SEQ ID NO: 1034 - RNA, 19 nt, synthetic construct
  misc_feature 1..19: note = Description of Artificial Sequence: Synthetic oligonucleotide
  source 1..19: mol_type = other RNA
aaatgaagaaggcagtgaa

SEQ ID NO: 1035 - RNA, 19 nt, synthetic construct
  misc_feature 1..19: note = Description of Artificial Sequence: Synthetic oligonucleotide
  source 1..19: mol_type = other RNA
tgagttggtatatggagcc

SEQ ID NO: 1036 - RNA, 19 nt, synthetic construct
  misc_feature 1..19: note = Description of Artificial Sequence: Synthetic oligonucleotide
  source 1..19: mol_type = other RNA
tccagcaactgatggaggt

SEQ ID NO: 1037 - RNA, 19 nt, synthetic construct
  misc_feature 1..19: note = Description of Artificial Sequence: Synthetic oligonucleotide
  source 1..19: mol_type = other RNA
aactgtaacctctggaaaa

SEQ ID NO: 1038 - RNA, 19 nt, synthetic construct
  misc_feature 1..19: note = Description of Artificial Sequence: Synthetic oligonucleotide
  source 1..19: mol_type = other RNA
tcaacaaatgggtgtccaa

SEQ ID NO: 1039 - RNA, 19 nt, synthetic construct
  misc_feature 1..19: note = Description of Artificial Sequence: Synthetic oligonucleotide
  source 1..19: mol_type = other RNA
gattagcggccatgtattc

SEQ ID NO: 1040 - RNA, 19 nt, synthetic construct
  misc_feature 1..19: note = Description of Artificial Sequence: Synthetic oligonucleotide
  source 1..19: mol_type = other RNA
gtgcttgagttgcccttca

SEQ ID NO: 1041 - RNA, 19 nt, synthetic construct
  misc_feature 1..19: note = Description of Artificial Sequence: Synthetic oligonucleotide
  source 1..19: mol_type = other RNA
tgcagaaggccgagatgac

SEQ ID NO: 1042 - RNA, 19 nt, synthetic construct
  misc_feature 1..19: note = Description of Artificial Sequence: Synthetic oligonucleotide
  source 1..19: mol_type = other RNA
ctatttttggtttgtgaac

SEQ ID NO: 1043 - RNA, 19 nt, synthetic construct
  misc_feature 1..19: note = Description of Artificial Sequence: Synthetic oligonucleotide
  source 1..19: mol_type = other RNA
cagtgaagcagctgcaagt

SEQ ID NO: 1044 - RNA, 19 nt, synthetic construct
  misc_feature 1..19: note = Description of Artificial Sequence: Synthetic oligonucleotide
  source 1..19: mol_type = other RNA
gtgtccaataagaccgaag

SEQ ID NO: 1045 - RNA, 19 nt, synthetic construct
  misc_feature 1..19: note = Description of Artificial Sequence: Synthetic oligonucleotide
  source 1..19: mol_type = other RNA
atgaattggaggagatgat

SEQ ID NO: 1046 - RNA, 19 nt, synthetic construct
  misc_feature 1..19: note = Description of Artificial Sequence: Synthetic oligonucleotide
  source 1..19: mol_type = other RNA
atctatgatgtaccaggaa

SEQ ID NO: 1047 - RNA, 19 nt, synthetic construct
  misc_feature 1..19: note = Description of Artificial Sequence: Synthetic oligonucleotide
  source 1..19: mol_type = other RNA
ccataaggcatttcttgag

SEQ ID NO: 1048 - RNA, 19 nt, synthetic construct
  misc_feature 1..19: note = Description of Artificial Sequence: Synthetic oligonucleotide
  source 1..19: mol_type = other RNA
atgcattccataaggcatt

SEQ ID NO: 1049 - RNA, 19 nt, synthetic construct
  misc_feature 1..19: note = Description of Artificial Sequence: Synthetic oligonucleotide
  source 1..19: mol_type = other RNA
tggtgctggttaacaccat

SEQ ID NO: 1050 - RNA, 19 nt, synthetic construct
  misc_feature 1..19: note = Description of Artificial Sequence: Synthetic oligonucleotide
  source 1..19: mol_type = other RNA
atctgttcagccctgaaaa

SEQ ID NO: 1051 - RNA, 19 nt, synthetic construct
  misc_feature 1..19: note = Description of Artificial Sequence: Synthetic oligonucleotide
  source 1..19: mol_type = other RNA
agatgatgctggtggtcca

SEQ ID NO: 1052 - RNA, 19 nt, synthetic construct
  misc_feature 1..19: note = Description of Artificial Sequence: Synthetic oligonucleotide
  source 1..19: mol_type = other RNA
atatggagccaagctccag

SEQ ID NO: 1053 - RNA, 19 nt, synthetic construct
  misc_feature 1..19: note = Description of Artificial Sequence: Synthetic oligonucleotide
  source 1..19: mol_type = other RNA
ccgaatcaccgatgtcatt

SEQ ID NO: 1054 - RNA, 19 nt, synthetic construct
  misc_feature 1..19: note = Description of Artificial Sequence: Synthetic oligonucleotide
  source 1..19: mol_type = other RNA
gcagagcaatccagagcgg

SEQ ID NO: 1055 - RNA, 19 nt, synthetic construct
  misc_feature 1..19: note = Description of Artificial Sequence: Synthetic oligonucleotide
  source 1..19: mol_type = other RNA
acaccatttacttcaaggg

SEQ ID NO: 1056 - RNA, 19 nt, synthetic construct
  misc_feature 1..19: note = Description of Artificial Sequence: Synthetic oligonucleotide
  source 1..19: mol_type = other RNA
gtaccaggaaggcaagttc

SEQ ID NO: 1057 - RNA, 19 nt, synthetic construct
  misc_feature 1..19: note = Description of Artificial Sequence: Synthetic oligonucleotide
  source 1..19: mol_type = other RNA
tgcccaagcctgagaagag

SEQ ID NO: 1058 - RNA, 19 nt, synthetic construct
  misc_feature 1..19: note = Description of Artificial Sequence: Synthetic oligonucleotide
  source 1..19: mol_type = other RNA
ttctttgccaaactgaact

SEQ ID NO: 1059 - RNA, 19 nt, synthetic construct
  misc_feature 1..19: note = Description of Artificial Sequence: Synthetic oligonucleotide
  source 1..19: mol_type = other RNA
tggccaaggtagagaagga

SEQ ID NO: 1060 - RNA, 19 nt, synthetic construct
  misc_feature 1..19: note = Description of Artificial Sequence: Synthetic oligonucleotide
  source 1..19: mol_type = other RNA
tgctgcaagagtggctgga

SEQ ID NO: 1061 - RNA, 19 nt, synthetic construct
  misc_feature 1..19: note = Description of Artificial Sequence: Synthetic oligonucleotide
  source 1..19: mol_type = other RNA
ccatgtgcatttaccgctc

SEQ ID NO: 1062 - RNA, 19 nt, synthetic construct
  misc_feature 1..19: note = Description of Artificial Sequence: Synthetic oligonucleotide
  source 1..19: mol_type = other RNA
agacatgggccttgtcgat

SEQ ID NO: 1063 - RNA, 19 nt, synthetic construct
  misc_feature 1..19: note = Description of Artificial Sequence: Synthetic oligonucleotide
  source 1..19: mol_type = other RNA
ttttggagacaaatccctt

SEQ ID NO: 1064 - RNA, 19 nt, synthetic construct
  misc_feature 1..19: note = Description of Artificial Sequence: Synthetic oligonucleotide
  source 1..19: mol_type = other RNA
ggatgagggctcagaacag

SEQ ID NO: 1065 - RNA, 19 nt, synthetic construct
  misc_feature 1..19: note = Description of Artificial Sequence: Synthetic oligonucleotide
  source 1..19: mol_type = other RNA
cggcttttgctatgaccaa

SEQ ID NO: 1066 - RNA, 19 nt, synthetic construct
  misc_feature 1..19: note = Description of Artificial Sequence: Synthetic oligonucleotide
  source 1..19: mol_type = other RNA
agctccagcccctggactt

SEQ ID NO: 1067 - RNA, 19 nt, synthetic construct
  misc_feature 1..19: note = Description of Artificial Sequence: Synthetic oligonucleotide
  source 1..19: mol_type = other RNA
ctgatcagatccacttctt

SEQ ID NO: 1068 - RNA, 19 nt, synthetic construct
  misc_feature 1..19: note = Description of Artificial Sequence: Synthetic oligonucleotide
  source 1..19: mol_type = other RNA
tgctggtggtccacatgcc

SEQ ID NO: 1069 - RNA, 19 nt, synthetic construct
  misc_feature 1..19: note = Description of Artificial Sequence: Synthetic oligonucleotide
  source 1..19: mol_type = other RNA
gcgagatttagaggaaaga

SEQ ID NO: 1070 - RNA, 19 nt, synthetic construct
  misc_feature 1..19: note = Description of Artificial Sequence: Synthetic oligonucleotide
  source 1..19: mol_type = other RNA
ctgctcattggcttctggg

SEQ ID NO: 1071 - RNA, 19 nt, synthetic construct
  misc_feature 1..19: note = Description of Artificial Sequence: Synthetic oligonucleotide
  source 1..19: mol_type = other RNA
ccttcaatgagacctacca

SEQ ID NO: 1072 - RNA, 19 nt, synthetic construct
  misc_feature 1..19: note = Description of Artificial Sequence: Synthetic oligonucleotide
  source 1..19: mol_type = other RNA
accatttacttcaagggcc

SEQ ID NO: 1073 - RNA, 19 nt, synthetic construct
  misc_feature 1..19: note = Description of Artificial Sequence: Synthetic oligonucleotide
  source 1..19: mol_type = other RNA
gcacctcttcctatttttg

SEQ ID NO: 1074 - RNA, 19 nt, synthetic construct
  misc_feature 1..19: note = Description of Artificial Sequence: Synthetic oligonucleotide
  source 1..19: mol_type = other RNA
gtggctgaaggcacccagg

SEQ ID NO: 1075 - RNA, 19 nt, synthetic construct
  misc_feature 1..19: note = Description of Artificial Sequence: Synthetic oligonucleotide
  source 1..19: mol_type = other RNA
tccgcattgaggacggctt

SEQ ID NO: 1076 - RNA, 19 nt, synthetic construct
  misc_feature 1..19: note = Description of Artificial Sequence: Synthetic oligonucleotide
  source 1..19: mol_type = other RNA
tggacatctgcacagccaa

SEQ ID NO: 1077 - RNA, 19 nt, synthetic construct
  misc_feature 1..19: note = Description of Artificial Sequence: Synthetic oligonucleotide
  source 1..19: mol_type = other RNA
gtccaaactcccaggtatt

SEQ ID NO: 1078 - RNA, 19 nt, synthetic construct
  misc_feature 1..19: note = Description of Artificial Sequence: Synthetic oligonucleotide
  source 1..19: mol_type = other RNA
agaaggaactcaccccaga

SEQ ID NO: 1079 - RNA, 19 nt, synthetic construct
  misc_feature 1..19: note = Description of Artificial Sequence: Synthetic oligonucleotide
  source 1..19: mol_type = other RNA
tcttgaggtaaatgaagaa

SEQ ID NO: 1080 - RNA, 19 nt, synthetic construct
  misc_feature 1..19: note = Description of Artificial Sequence: Synthetic oligonucleotide
  source 1..19: mol_type = other RNA
agccctgtggacatctgca

SEQ ID NO: 1081 - RNA, 19 nt, synthetic construct
  misc_feature 1..19: note = Description of Artificial Sequence: Synthetic oligonucleotide
  source 1..19: mol_type = other RNA
cagagcggccatcaacaaa

SEQ ID NO: 1082 - RNA, 19 nt, synthetic construct
  misc_feature 1..19: note = Description of Artificial Sequence: Synthetic oligonucleotide
  source 1..19: mol_type = other RNA
atttaagtttgacaccata

SEQ ID NO: 1083 - RNA, 19 nt, synthetic construct
  misc_feature 1..19: note = Description of Artificial Sequence: Synthetic oligonucleotide
  source 1..19: mol_type = other RNA
tgagaagagcctggccaag

SEQ ID NO: 1084 - RNA, 19 nt, synthetic construct
  misc_feature 1..19: note = Description of Artificial Sequence: Synthetic oligonucleotide
  source 1..19: mol_type = other RNA
tcaccatggtcctcatctt

SEQ ID NO: 1085 - RNA, 19 nt, synthetic construct
  misc_feature 1..19: note = Description of Artificial Sequence: Synthetic oligonucleotide
  source 1..19: mol_type = other RNA
ggaaggaactgttctacaa

SEQ ID NO: 1086 - RNA, 19 nt, synthetic construct
  misc_feature 1..19: note = Description of Artificial Sequence: Synthetic oligonucleotide
  source 1..19: mol_type = other RNA
ctggtttttataagagaag

SEQ ID NO: 1087 - RNA, 19 nt, synthetic construct
  misc_feature 1..19: note = Description of Artificial Sequence: Synthetic oligonucleotide
  source 1..19: mol_type = other RNA
ctgggtgcctgtaatgaca

SEQ ID NO: 1088 - RNA, 19 nt, synthetic construct
  misc_feature 1..19: note = Description of Artificial Sequence: Synthetic oligonucleotide
  source 1..19: mol_type = other RNA
gtaccgctgttgtgattgc

SEQ ID NO: 1089 - RNA, 19 nt, synthetic construct
  misc_feature 1..19: note = Description of Artificial Sequence: Synthetic oligonucleotide
  source 1..19: mol_type = other RNA
tctatcagcacctggcaga

SEQ ID NO: 1090 - RNA, 19 nt, synthetic construct
  misc_feature 1..19: note = Description of Artificial Sequence: Synthetic oligonucleotide
  source 1..19: mol_type = other RNA
ctggcagattccaagaatg

SEQ ID NO: 1091 - RNA, 19 nt, synthetic construct
  misc_feature 1..19: note = Description of Artificial Sequence: Synthetic oligonucleotide
  source 1..19: mol_type = other RNA
cgatgtcattccctcggaa

SEQ ID NO: 1092 - RNA, 19 nt, synthetic construct
  misc_feature 1..19: note = Description of Artificial Sequence: Synthetic oligonucleotide
  source 1..19: mol_type = other RNA
gcttctgggactgcgtgac

SEQ ID NO: 1093 - RNA, 19 nt, synthetic construct
  misc_feature 1..19: note = Description of Artificial Sequence: Synthetic oligonucleotide
  source 1..19: mol_type = other RNA
cctgtcacgggagccctgt

SEQ ID NO: 1094 - RNA, 19 nt, synthetic construct
  misc_feature 1..19: note = Description of Artificial Sequence: Synthetic oligonucleotide
  source 1..19: mol_type = other RNA
atttacttcaagggcctgt

SEQ ID NO: 1095 - RNA, 19 nt, synthetic construct
  misc_feature 1..19: note = Description of Artificial Sequence: Synthetic oligonucleotide
  source 1..19: mol_type = other RNA
tgctaccactttctatcag

SEQ ID NO: 1096 - RNA, 19 nt, synthetic construct
  misc_feature 1..19: note = Description of Artificial Sequence: Synthetic oligonucleotide
  source 1..19: mol_type = other RNA
ggaactgtccaaggccaat

SEQ ID NO: 1097 - RNA, 19 nt, synthetic construct
  misc_feature 1..19: note = Description of Artificial Sequence: Synthetic oligonucleotide
  source 1..19: mol_type = other RNA
acaaatcctccaagttagt

SEQ ID NO: 1098 - RNA, 19 nt, synthetic construct
  misc_feature 1..19: note = Description of Artificial Sequence: Synthetic oligonucleotide
  source 1..19: mol_type = other RNA
atttaccgctccccggaga

SEQ ID NO: 1099 - RNA, 19 nt, synthetic construct
  misc_feature 1..19: note = Description of Artificial Sequence: Synthetic oligonucleotide
  source 1..19: mol_type = other RNA
acccctgagtatctccacg

SEQ ID NO: 1100 - RNA, 19 nt, synthetic construct
  misc_feature 1..19: note = Description of Artificial Sequence: Synthetic oligonucleotide
  source 1..19: mol_type = other RNA
cactatctccacttgccca

SEQ ID NO: 1101 - RNA, 19 nt, synthetic construct
  misc_feature 1..19: note = Description of Artificial Sequence: Synthetic oligonucleotide
  source 1..19: mol_type = other RNA
aaatacaaactacttccat

SEQ ID NO: 1102 - RNA, 19 nt, synthetic construct
  misc_feature 1..19: note = Description of Artificial Sequence: Synthetic oligonucleotide
  source 1..19: mol_type = other RNA
ctggttaacaccatttact

SEQ ID NO: 1103 - RNA, 19 nt, synthetic construct
  misc_feature 1..19: note = Description of Artificial Sequence: Synthetic oligonucleotide
  source 1..19: mol_type = other RNA
tcatcttgcccaagcctga

SEQ ID NO: 1104 - RNA, 19 nt, synthetic construct
  misc_feature 1..19: note = Description of Artificial Sequence: Synthetic oligonucleotide
  source 1..19: mol_type = other RNA
cctcagatcacactatctc

SEQ ID NO: 1105 - RNA, 19 nt, synthetic construct
  misc_feature 1..19: note = Description of Artificial Sequence: Synthetic oligonucleotide
  source 1..19: mol_type = other RNA
ctgtcctctggaacctctg

SEQ ID NO: 1106 - RNA, 19 nt, synthetic construct
  misc_feature 1..19: note = Description of Artificial Sequence: Synthetic oligonucleotide
  source 1..19: mol_type = other RNA
ccctgtggaagattagcgg

SEQ ID NO: 1107 - RNA, 19 nt, synthetic construct
  misc_feature 1..19: note = Description of Artificial Sequence: Synthetic oligonucleotide
  source 1..19: mol_type = other RNA
atctccacggcttttgcta

SEQ ID NO: 1108 - RNA, 19 nt, synthetic construct
  misc_feature 1..19: note = Description of Artificial Sequence: Synthetic oligonucleotide
  source 1..19: mol_type = other RNA
gtggctggatgaattggag

SEQ ID NO: 1109 - RNA, 19 nt, synthetic construct
  misc_feature 1..19: note = Description of Artificial Sequence: Synthetic oligonucleotide
  source 1..19: mol_type = other RNA
caagttagtatcagccaat

SEQ ID NO: 1110 - RNA, 19 nt, synthetic construct
  misc_feature 1..19: note = Description of Artificial Sequence: Synthetic oligonucleotide
  source 1..19: mol_type = other RNA
gtgatgacatcaccatggt

SEQ ID NO: 1111 - RNA, 19 nt, synthetic construct
  misc_feature 1..19: note = Description of Artificial Sequence: Synthetic oligonucleotide
  source 1..19: mol_type = other RNA
ttccaagaatgacaatgat

SEQ ID NO: 1112 - RNA, 19 nt, synthetic construct
  misc_feature 1..19: note = Description of Artificial Sequence: Synthetic oligonucleotide
  source 1..19: mol_type = other RNA
tgatggaggtatttaagtt

SEQ ID NO: 1113 - RNA, 19 nt, synthetic construct
  misc_feature 1..19: note = Description of Artificial Sequence: Synthetic oligonucleotide
  source 1..19: mol_type = other RNA
gtattccaatgtgatagga

SEQ ID NO: 1114 - RNA, 19 nt, synthetic construct
  misc_feature 1..19: note = Description of Artificial Sequence: Synthetic oligonucleotide
  source 1..19: mol_type = other RNA
cagccaagccgcgggacat

SEQ ID NO: 1115 - RNA, 19 nt, synthetic construct
  misc_feature 1..19: note = Description of Artificial Sequence: Synthetic oligonucleotide
  source 1..19: mol_type = other RNA
catgccccgcttccgcatt

SEQ ID NO: 1116 - RNA, 19 nt, synthetic construct
  misc_feature 1..19: note = Description of Artificial Sequence: Synthetic oligonucleotide
  source 1..19: mol_type = other RNA
atgtgataggaactgtaac

SEQ ID NO: 1117 - RNA, 19 nt, synthetic construct
  misc_feature 1..19: note = Description of Artificial Sequence: Synthetic oligonucleotide
  source 1..19: mol_type = other RNA
acaaatcccttaccttcaa

SEQ ID NO: 1118 - RNA, 19 nt, synthetic construct
  misc_feature 1..19: note = Description of Artificial Sequence: Synthetic oligonucleotide
  source 1..19: mol_type = other RNA
aggtttatcttttgtcctt

SEQ ID NO: 1119 - RNA, 19 nt, synthetic construct
  misc_feature 1..19: note = Description of Artificial Sequence: Synthetic oligonucleotide
  source 1..19: mol_type = other RNA
agatcccggaggccaccaa

SEQ ID NO: 1120 - RNA, 19 nt, synthetic construct
  misc_feature 1..19: note = Description of Artificial Sequence: Synthetic oligonucleotide
  source 1..19: mol_type = other RNA
acattttcctgtcacccct

SEQ ID NO: 1121 - RNA, 19 nt, synthetic construct
  misc_feature 1..19: note = Description of Artificial Sequence: Synthetic oligonucleotide
  source 1..19: mol_type = other RNA
ggcctttcctggtttttat

SEQ ID NO: 1122 - RNA, 19 nt, synthetic construct
  misc_feature 1..19: note = Description of Artificial Sequence: Synthetic oligonucleotide
  source 1..19: mol_type = other RNA
ttgtgttaagtaaaatgtt

SEQ ID NO: 1123 - RNA, 19 nt, synthetic construct
  misc_feature 1..19: note = Description of Artificial Sequence: Synthetic oligonucleotide
  source 1..19: mol_type = other RNA
caaggaaaatgcagagcaa

SEQ ID NO: 1124 - RNA, 19 nt, synthetic construct
  misc_feature 1..19: note = Description of Artificial Sequence: Synthetic oligonucleotide
  source 1..19: mol_type = other RNA
ctgagaaaacatctgatca

SEQ ID NO: 1125 - RNA, 19 nt, synthetic construct
  misc_feature 1..19: note = Description of Artificial Sequence: Synthetic oligonucleotide
  source 1..19: mol_type = other RNA
ttacttcaagggcctgtgg

SEQ ID NO: 1126 - RNA, 19 nt, synthetic construct
  misc_feature 1..19: note = Description of Artificial Sequence: Synthetic oligonucleotide
  source 1..19: mol_type = other RNA
accccaacagggtgacttt

SEQ ID NO: 1127 - RNA, 19 nt, synthetic construct
  misc_feature 1..19: note = Description of Artificial Sequence: Synthetic oligonucleotide
  source 1..19: mol_type = other RNA
ccaggtattgttgcagaag

SEQ ID NO: 1128 - RNA, 19 nt, synthetic construct
  misc_feature 1..19: note = Description of Artificial Sequence: Synthetic oligonucleotide
  source 1..19: mol_type = other RNA
gcctgtggaagtcaaagtt

SEQ ID NO: 1129 - RNA, 19 nt, synthetic construct
  misc_feature 1..19: note = Description of Artificial Sequence: Synthetic oligonucleotide
  source 1..19: mol_type = other RNA
tggaacctctgcgagattt

SEQ ID NO: 1130 - RNA, 19 nt, synthetic construct
  misc_feature 1..19: note = Description of Artificial Sequence: Synthetic oligonucleotide
  source 1..19: mol_type = other RNA
agccctgagaacacaagga

SEQ ID NO: 1131 - RNA, 19 nt, synthetic construct
  misc_feature 1..19: note = Description of Artificial Sequence: Synthetic oligonucleotide
  source 1..19: mol_type = other RNA
ctctatgtctcagatgcat

SEQ ID NO: 1132 - RNA, 19 nt, synthetic construct
  misc_feature 1..19: note = Description of Artificial Sequence: Synthetic oligonucleotide
  source 1..19: mol_type = other RNA
aagaccgaaggccgaatca

SEQ ID NO: 1133 - RNA, 19 nt, synthetic construct
  misc_feature 1..19: note = Description of Artificial Sequence: Synthetic oligonucleotide
  source 1..19: mol_type = other RNA
taaaatgttcttattcttt

SEQ ID NO: 1134 - RNA, 19 nt, synthetic construct
  misc_feature 1..19: note = Description of Artificial Sequence: Synthetic oligonucleotide
  source 1..19: mol_type = other RNA
tctggaaaaaggaaggttt

SEQ ID NO: 1135 - RNA, 19 nt, synthetic construct
  misc_feature 1..19: note = Description of Artificial Sequence: Synthetic oligonucleotide
  source 1..19: mol_type = other RNA
ttcaaggccaacaggcctt

SEQ ID NO: 1136 - RNA, 19 nt, synthetic construct
  misc_feature 1..19: note = Description of Artificial Sequence: Synthetic oligonucleotide
  source 1..19: mol_type = other RNA
gaagtcaaagttcagccct

SEQ ID NO: 1137 - RNA, 19 nt, synthetic construct
  misc_feature 1..19: note = Description of Artificial Sequence: Synthetic oligonucleotide
  source 1..19: mol_type = other RNA
ccatcaatgagctcactgt

SEQ ID NO: 1138 - RNA, 19 nt, synthetic construct
  misc_feature 1..19: note = Description of Artificial Sequence: Synthetic oligonucleotide
  source 1..19: mol_type = other RNA
ctctgaacactattatctt

SEQ ID NO: 1139 - RNA, 19 nt, synthetic construct
  misc_feature 1..19: note = Description of Artificial Sequence: Synthetic oligonucleotide
  source 1..19: mol_type = other RNA
tgctggttaacaccattta

SEQ ID NO: 1140 - RNA, 19 nt, synthetic construct
  misc_feature 1..19: note = Description of Artificial Sequence: Synthetic oligonucleotide
  source 1..19: mol_type = other RNA
agaggaaagaaccagtttt

SEQ ID NO: 1141 - RNA, 19 nt, synthetic construct
  misc_feature 1..19: note = Description of Artificial Sequence: Synthetic oligonucleotide
  source 1..19: mol_type = other RNA
tgcccagccctgtggaaga

SEQ ID NO: 1142 - RNA, 19 nt, synthetic construct
  misc_feature 1..19: note = Description of Artificial Sequence: Synthetic oligonucleotide
  source 1..19: mol_type = other RNA
ctcagttgccttcttctcc

SEQ ID NO: 1143 - RNA, 19 nt, synthetic construct
  misc_feature 1..19: note = Description of Artificial Sequence: Synthetic oligonucleotide
  source 1..19: mol_type = other RNA
caggcacccagcttggtca

SEQ ID NO: 1144 - RNA, 19 nt, synthetic construct
  misc_feature 1..19: note = Description of Artificial Sequence: Synthetic oligonucleotide
  source 1..19: mol_type = other RNA
gaagtaaatggtgttaacc

SEQ ID NO: 1145 - RNA, 19 nt, synthetic construct
  misc_feature 1..19: note = Description of Artificial Sequence: Synthetic oligonucleotide
  source 1..19: mol_type = other RNA
gtaaatggtgttaaccagc

SEQ ID NO: 1146 - RNA, 19 nt, synthetic construct
  misc_feature 1..19: note = Description of Artificial Sequence: Synthetic oligonucleotide
  source 1..19: mol_type = other RNA
ttgctggagggtgtcatta

SEQ ID NO: 1147 - RNA, 19 nt, synthetic construct
  misc_feature 1..19: note = Description of Artificial Sequence: Synthetic oligonucleotide
  source 1..19: mol_type = other RNA
atcatagatgctgaacacg

SEQ ID NO: 1148 - RNA, 19 nt, synthetic construct
  misc_feature 1..19: note = Description of Artificial Sequence: Synthetic oligonucleotide
  source 1..19: mol_type = other RNA
aaactgaagccgtcctcaa

SEQ ID NO: 1149 - RNA, 19 nt, synthetic construct
  misc_feature 1..19: note = Description of Artificial Sequence: Synthetic oligonucleotide
  source 1..19: mol_type = other RNA
acagttcccagacacgccg

SEQ ID NO: 1150 - RNA, 19 nt, synthetic construct
  misc_feature 1..19: note = Description of Artificial Sequence: Synthetic oligonucleotide
  source 1..19: mol_type = other RNA
ttgaagtaaatggtgttaa

SEQ ID NO: 1151 - RNA, 19 nt, synthetic construct
  misc_feature 1..19: note = Description of Artificial Sequence: Synthetic oligonucleotide
  source 1..19: mol_type = other RNA
gagtttggacttttcaggg

SEQ ID NO: 1152 - RNA, 19 nt, synthetic construct
  misc_feature 1..19: note = Description of Artificial Sequence: Synthetic oligonucleotide
  source 1..19: mol_type = other RNA
agacatagaggtcatctcg

SEQ ID NO: 1153 - RNA, 19 nt, synthetic construct
  misc_feature 1..19: note = Description of Artificial Sequence: Synthetic oligonucleotide
  source 1..19: mol_type = other RNA
tctccatcagccttgtaga

SEQ ID NO: 1154 - RNA, 19 nt, synthetic construct
  misc_feature 1..19: note = Description of Artificial Sequence: Synthetic oligonucleotide
  source 1..19: mol_type = other RNA
agcaccagaacagtgagct

SEQ ID NO: 1155 - RNA, 19 nt, synthetic construct
  misc_feature 1..19: note = Description of Artificial Sequence: Synthetic oligonucleotide
  source 1..19: mol_type = other RNA
atgtcttgcagctgctcct

SEQ ID NO: 1156 - RNA, 19 nt, synthetic construct
  misc_feature 1..19: note = Description of Artificial Sequence: Synthetic oligonucleotide
  source 1..19: mol_type = other RNA
agacacgccggttggtggc

SEQ ID NO: 1157 - RNA, 19 nt, synthetic construct
  misc_feature 1..19: note = Description of Artificial Sequence: Synthetic oligonucleotide
  source 1..19: mol_type = other RNA
tccgggatcttctgttctg

SEQ ID NO: 1158 - RNA, 19 nt, synthetic construct
  misc_feature 1..19: note = Description of Artificial Sequence: Synthetic oligonucleotide
  source 1..19: mol_type = other RNA
gctgaacagatcgacaagg

SEQ ID NO: 1159 - RNA, 19 nt, synthetic construct
  misc_feature 1..19: note = Description of Artificial Sequence: Synthetic oligonucleotide
  source 1..19: mol_type = other RNA
ccgataacggaacttgcct

SEQ ID NO: 1160 - RNA, 19 nt, synthetic construct
  misc_feature 1..19: note = Description of Artificial Sequence: Synthetic oligonucleotide
  source 1..19: mol_type = other RNA
atgagcagcaaggacaaaa

SEQ ID NO: 1161 - RNA, 19 nt, synthetic construct
  misc_feature 1..19: note = Description of Artificial Sequence: Synthetic oligonucleotide
  source 1..19: mol_type = other RNA
ctgatgtcctggtaggtct

SEQ ID NO: 1162 - RNA, 19 nt, synthetic construct
  misc_feature 1..19: note = Description of Artificial Sequence: Synthetic oligonucleotide
  source 1..19: mol_type = other RNA
tagagtcggcagttcagtt

SEQ ID NO: 1163 - RNA, 19 nt, synthetic construct
  misc_feature 1..19: note = Description of Artificial Sequence: Synthetic oligonucleotide
  source 1..19: mol_type = other RNA
caggcccttgaagtaaatg

SEQ ID NO: 1164 - RNA, 19 nt, synthetic construct
  misc_feature 1..19: note = Description of Artificial Sequence: Synthetic oligonucleotide
  source 1..19: mol_type = other RNA
ttttccttgaagtccaggg

SEQ ID NO: 1165 - RNA, 19 nt, synthetic construct
  misc_feature 1..19: note = Description of Artificial Sequence: Synthetic oligonucleotide
  source 1..19: mol_type = other RNA
aacagcggtacttgcagct

SEQ ID NO: 1166 - RNA, 19 nt, synthetic construct
  misc_feature 1..19: note = Description of Artificial Sequence: Synthetic oligonucleotide
  source 1..19: mol_type = other RNA
aacagttccttccttgtgt

SEQ ID NO: 1167 - RNA, 19 nt, synthetic construct
  misc_feature 1..19: note = Description of Artificial Sequence: Synthetic oligonucleotide
  source 1..19: mol_type = other RNA
agccctcatcctcagttgc

SEQ ID NO: 1168 - RNA, 19 nt, synthetic construct
  misc_feature 1..19: note = Description of Artificial Sequence: Synthetic oligonucleotide
  source 1..19: mol_type = other RNA
taacacaagggttggctac

SEQ ID NO: 1169 - RNA, 19 nt, synthetic construct
  misc_feature 1..19: note = Description of Artificial Sequence: Synthetic oligonucleotide
  source 1..19: mol_type = other RNA
tttacttctgttcacaaac

SEQ ID NO: 1170 - RNA, 19 nt, synthetic construct
  misc_feature 1..19: note = Description of Artificial Sequence: Synthetic oligonucleotide
  source 1..19: mol_type = other RNA
ttggccttgaaagtcaccc

SEQ ID NO: 1171 - RNA, 19 nt, synthetic construct
  misc_feature 1..19: note = Description of Artificial Sequence: Synthetic oligonucleotide
  source 1..19: mol_type = other RNA
ttcagccacgcgccgataa

SEQ ID NO: 1172 - RNA, 19 nt, synthetic construct
  misc_feature 1..19: note = Description of Artificial Sequence: Synthetic oligonucleotide
  source 1..19: mol_type = other RNA
tttggcaaagaagaagtgg

SEQ ID NO: 1173 - RNA, 19 nt, synthetic construct
  misc_feature 1..19: note = Description of Artificial Sequence: Synthetic oligonucleotide
  source 1..19: mol_type = other RNA
ccttgaagtaaatggtgtt

SEQ ID NO: 1174 - RNA, 19 nt, synthetic construct
  misc_feature 1..19: note = Description of Artificial Sequence: Synthetic oligonucleotide
  source 1..19: mol_type = other RNA
ctgaacacgactctccatc

SEQ ID NO: 1175 - RNA, 19 nt, synthetic construct
  misc_feature 1..19: note = Description of Artificial Sequence: Synthetic oligonucleotide
  source 1..19: mol_type = other RNA
gcccttgaagtaaatggtg

SEQ ID NO: 1176 - RNA, 19 nt, synthetic construct
  misc_feature 1..19: note = Description of Artificial Sequence: Synthetic oligonucleotide
  source 1..19: mol_type = other RNA
cacaggcccttgaagtaaa

SEQ ID NO: 1177 - RNA, 19 nt, synthetic construct
  misc_feature 1..19: note = Description of Artificial Sequence: Synthetic oligonucleotide
  source 1..19: mol_type = other RNA
ttcagaggaacttctctta

SEQ ID NO: 1178 - RNA, 19 nt, synthetic construct
  misc_feature 1..19: note = Description of Artificial Sequence: Synthetic oligonucleotide
  source 1..19: mol_type = other RNA
attcatgggaatgtcccgc

SEQ ID NO: 1179 - RNA, 19 nt, synthetic construct
  misc_feature 1..19: note = Description of Artificial Sequence: Synthetic oligonucleotide
  source 1..19: mol_type = other RNA
cagaggacagggtggggca

SEQ ID NO: 1180 - RNA, 19 nt, synthetic construct
  misc_feature 1..19: note = Description of Artificial Sequence: Synthetic oligonucleotide
  source 1..19: mol_type = other RNA
aagtaaatggtgttaacca

SEQ ID NO: 1181 - RNA, 19 nt, synthetic construct
  misc_feature 1..19: note = Description of Artificial Sequence: Synthetic oligonucleotide
  source 1..19: mol_type = other RNA
tgtgatctgaggcaatccg

SEQ ID NO: 1182 - RNA, 19 nt, synthetic construct
  misc_feature 1..19: note = Description of Artificial Sequence: Synthetic oligonucleotide
  source 1..19: mol_type = other RNA
caactcactgatgtcctgg

SEQ ID NO: 1183 - RNA, 19 nt, synthetic construct
  misc_feature 1..19: note = Description of Artificial Sequence: Synthetic oligonucleotide
  source 1..19: mol_type = other RNA
caatccgcctgaaaactgg

SEQ ID NO: 1184 - RNA, 19 nt, synthetic construct
  misc_feature 1..19: note = Description of Artificial Sequence: Synthetic oligonucleotide
  source 1..19: mol_type = other RNA
tgttttctcagatatggtg

SEQ ID NO: 1185 - RNA, 19 nt, synthetic construct
  misc_feature 1..19: note = Description of Artificial Sequence: Synthetic oligonucleotide
  source 1..19: mol_type = other RNA
tttgtatttatttttactt

SEQ ID NO: 1186 - RNA, 19 nt, synthetic construct
  misc_feature 1..19: note = Description of Artificial Sequence: Synthetic oligonucleotide
  source 1..19: mol_type = other RNA
aactcaagcacctgggtgc

SEQ ID NO: 1187 - RNA, 19 nt, synthetic construct
  misc_feature 1..19: note = Description of Artificial Sequence: Synthetic oligonucleotide
  source 1..19: mol_type = other RNA
cttgaagtaaatggtgtta

SEQ ID NO: 1188 - RNA, 19 nt, synthetic construct
  misc_feature 1..19: note = Description of Artificial Sequence: Synthetic oligonucleotide
  source 1..19: mol_type = other RNA
atgtcatcacctttgaagg

SEQ ID NO: 1189 - RNA, 19 nt, synthetic construct
  misc_feature 1..19: note = Description of Artificial Sequence: Synthetic oligonucleotide
  source 1..19: mol_type = other RNA
aaagcgggaattggccttg

SEQ ID NO: 1190 - RNA, 19 nt, synthetic construct
  misc_feature 1..19: note = Description of Artificial Sequence: Synthetic oligonucleotide
  source 1..19: mol_type = other RNA
agctgctccttcaaactga

SEQ ID NO: 1191 - RNA, 19 nt, synthetic construct
  misc_feature 1..19: note = Description of Artificial Sequence: Synthetic oligonucleotide
  source 1..19: mol_type = other RNA
tgacaggtcacgcagtccc

SEQ ID NO: 1192 - RNA, 19 nt, synthetic construct
  misc_feature 1..19: note = Description of Artificial Sequence: Synthetic oligonucleotide
  source 1..19: mol_type = other RNA
caaaaaggcgattggctga

SEQ ID NO: 1193 - RNA, 19 nt, synthetic construct
  misc_feature 1..19: note = Description of Artificial Sequence: Synthetic oligonucleotide
  source 1..19: mol_type = other RNA
tcattgatggcttccgagg

SEQ ID NO: 1194 - RNA, 19 nt, synthetic construct
  misc_feature 1..19: note = Description of Artificial Sequence: Synthetic oligonucleotide
  source 1..19: mol_type = other RNA
ggaaaatgttatcattgtc

SEQ ID NO: 1195 - RNA, 19 nt, synthetic construct
  misc_feature 1..19: note = Description of Artificial Sequence: Synthetic oligonucleotide
  source 1..19: mol_type = other RNA
aagaggtgcaaagaataag

SEQ ID NO: 1196 - RNA, 19 nt, synthetic construct
  misc_feature 1..19: note = Description of Artificial Sequence: Synthetic oligonucleotide
  source 1..19: mol_type = other RNA
ttagcgaacggccagcaat

SEQ ID NO: 1197 - RNA, 19 nt, synthetic construct
  misc_feature 1..19: note = Description of Artificial Sequence: Synthetic oligonucleotide
  source 1..19: mol_type = other RNA
ttcactgccttcttcattt

SEQ ID NO: 1198 - RNA, 19 nt, synthetic construct
  misc_feature 1..19: note = Description of Artificial Sequence: Synthetic oligonucleotide
  source 1..19: mol_type = other RNA
ggctccatataccaactca

SEQ ID NO: 1199 - RNA, 19 nt, synthetic construct
  misc_feature 1..19: note = Description of Artificial Sequence: Synthetic oligonucleotide
  source 1..19: mol_type = other RNA
acctccatcagttgctgga

SEQ ID NO: 1200 - RNA, 19 nt, synthetic construct
  misc_feature 1..19: note = Description of Artificial Sequence: Synthetic oligonucleotide
  source 1..19: mol_type = other RNA
ttttccagaggttacagtt

SEQ ID NO: 1201 - RNA, 19 nt, synthetic construct
  misc_feature 1..19: note = Description of Artificial Sequence: Synthetic oligonucleotide
  source 1..19: mol_type = other RNA
ttggacacccatttgttga

SEQ ID NO: 1202 - RNA, 19 nt, synthetic construct
  misc_feature 1..19: note = Description of Artificial Sequence: Synthetic oligonucleotide
  source 1..19: mol_type = other RNA
gaatacatggccgctaatc

SEQ ID NO: 1203 - RNA, 19 nt, synthetic construct
  misc_feature 1..19: note = Description of Artificial Sequence: Synthetic oligonucleotide
  source 1..19: mol_type = other RNA
tgaagggcaactcaagcac

SEQ ID NO: 1204 - RNA, 19 nt, synthetic construct
  misc_feature 1..19: note = Description of Artificial Sequence: Synthetic oligonucleotide
  source 1..19: mol_type = other RNA
gtcatctcggccttctgca

SEQ ID NO: 1205 - RNA, 19 nt, synthetic construct
  misc_feature 1..19: note = Description of Artificial Sequence: Synthetic oligonucleotide
  source 1..19: mol_type = other RNA
gttcacaaaccaaaaatag

SEQ ID NO: 1206 - RNA, 19 nt, synthetic construct
  misc_feature 1..19: note = Description of Artificial Sequence: Synthetic oligonucleotide
  source 1..19: mol_type = other RNA
acttgcagctgcttcactg

SEQ ID NO: 1207 - RNA, 19 nt, synthetic construct
  misc_feature 1..19: note = Description of Artificial Sequence: Synthetic oligonucleotide
  source 1..19: mol_type = other RNA
cttcggtcttattggacac

SEQ ID NO: 1208 - RNA, 19 nt, synthetic construct
  misc_feature 1..19: note = Description of Artificial Sequence: Synthetic oligonucleotide
  source 1..19: mol_type = other RNA
atcatctcctccaattcat

SEQ ID NO: 1209 - RNA, 19 nt, synthetic construct
  misc_feature 1..19: note = Description of Artificial Sequence: Synthetic oligonucleotide
  source 1..19: mol_type = other RNA
ttcctggtacatcatagat

SEQ ID NO: 1210 - RNA, 19 nt, synthetic construct
  misc_feature 1..19: note = Description of Artificial Sequence: Synthetic oligonucleotide
  source 1..19: mol_type = other RNA
ctcaagaaatgccttatgg

SEQ ID NO: 1211 - RNA, 19 nt, synthetic construct
  misc_feature 1..19: note = Description of Artificial Sequence: Synthetic oligonucleotide
  source 1..19: mol_type = other RNA
aatgccttatggaatgcat

SEQ ID NO: 1212 - RNA, 19 nt, synthetic construct
  misc_feature 1..19: note = Description of Artificial Sequence: Synthetic oligonucleotide
  source 1..19: mol_type = other RNA
atggtgttaaccagcacca

SEQ ID NO: 1213 - RNA, 19 nt, synthetic construct
  misc_feature 1..19: note = Description of Artificial Sequence: Synthetic oligonucleotide
  source 1..19: mol_type = other RNA
ttttcagggctgaacagat

SEQ ID NO: 1214 - RNA, 19 nt, synthetic construct
  misc_feature 1..19: note = Description of Artificial Sequence: Synthetic oligonucleotide
  source 1..19: mol_type = other RNA
tggaccaccagcatcatct

SEQ ID NO: 1215 - RNA, 19 nt, synthetic construct
  misc_feature 1..19: note = Description of Artificial Sequence: Synthetic oligonucleotide
  source 1..19: mol_type = other RNA
ctggagcttggctccatat

SEQ ID NO: 1216 - RNA, 19 nt, synthetic construct
  misc_feature 1..19: note = Description of Artificial Sequence: Synthetic oligonucleotide
  source 1..19: mol_type = other RNA
aatgacatcggtgattcgg

SEQ ID NO: 1217 - RNA, 19 nt, synthetic construct
  misc_feature 1..19: note = Description of Artificial Sequence: Synthetic oligonucleotide
  source 1..19: mol_type = other RNA
ccgctctggattgctctgc

SEQ ID NO: 1218 - RNA, 19 nt, synthetic construct
  misc_feature 1..19: note = Description of Artificial Sequence: Synthetic oligonucleotide
  source 1..19: mol_type = other RNA
cccttgaagtaaatggtgt

SEQ ID NO: 1219 - RNA, 19 nt, synthetic construct
  misc_feature 1..19: note = Description of Artificial Sequence: Synthetic oligonucleotide
  source 1..19: mol_type = other RNA
gaacttgccttcctggtac

SEQ ID NO: 1220 - RNA, 19 nt, synthetic construct
  misc_feature 1..19: note = Description of Artificial Sequence: Synthetic oligonucleotide
  source 1..19: mol_type = other RNA
ctcttctcaggcttgggca

SEQ ID NO: 1221 - RNA, 19 nt, synthetic construct
  misc_feature 1..19: note = Description of Artificial Sequence: Synthetic oligonucleotide
  source 1..19: mol_type = other RNA
agttcagtttggcaaagaa

SEQ ID NO: 1222 - RNA, 19 nt, synthetic construct
  misc_feature 1..19: note = Description of Artificial Sequence: Synthetic oligonucleotide
  source 1..19: mol_type = other RNA
tccttctctaccttggcca

SEQ ID NO: 1223 - RNA, 19 nt, synthetic construct
  misc_feature 1..19: note = Description of Artificial Sequence: Synthetic oligonucleotide
  source 1..19: mol_type = other RNA
tccagccactcttgcagca

SEQ ID NO: 1224 - RNA, 19 nt, synthetic construct
  misc_feature 1..19: note = Description of Artificial Sequence: Synthetic oligonucleotide
  source 1..19: mol_type = other RNA
gagcggtaaatgcacatgg

SEQ ID NO: 1225 - RNA, 19 nt, synthetic construct
  misc_feature 1..19: note = Description of Artificial Sequence: Synthetic oligonucleotide
  source 1..19: mol_type = other RNA
atcgacaaggcccatgtct

SEQ ID NO: 1226 - RNA, 19 nt, synthetic construct
  misc_feature 1..19: note = Description of Artificial Sequence: Synthetic oligonucleotide
  source 1..19: mol_type = other RNA
aagggatttgtctccaaaa

SEQ ID NO: 1227 - RNA, 19 nt, synthetic construct
  misc_feature 1..19: note = Description of Artificial Sequence: Synthetic oligonucleotide
  source 1..19: mol_type = other RNA
ctgttctgagccctcatcc

SEQ ID NO: 1228 - RNA, 19 nt, synthetic construct
  misc_feature 1..19: note = Description of Artificial Sequence: Synthetic oligonucleotide
  source 1..19: mol_type = other RNA
ttggtcatagcaaaagccg

SEQ ID NO: 1229 - RNA, 19 nt, synthetic construct
  misc_feature 1..19: note = Description of Artificial Sequence: Synthetic oligonucleotide
  source 1..19: mol_type = other RNA
aagtccaggggctggagct

SEQ ID NO: 1230 - RNA, 19 nt, synthetic construct
  misc_feature 1..19: note = Description of Artificial Sequence: Synthetic oligonucleotide
  source 1..19: mol_type = other RNA
aagaagtggatctgatcag

SEQ ID NO: 1231 - RNA, 19 nt, synthetic construct
  misc_feature 1..19: note = Description of Artificial Sequence: Synthetic oligonucleotide
  source 1..19: mol_type = other RNA
ggcatgtggaccaccagca

SEQ ID NO: 1232 - RNA, 19 nt, synthetic construct
  misc_feature 1..19: note = Description of Artificial Sequence: Synthetic oligonucleotide
  source 1..19: mol_type = other RNA
tctttcctctaaatctcgc

SEQ ID NO: 1233 - RNA, 19 nt, synthetic construct
  misc_feature 1..19: note = Description of Artificial Sequence: Synthetic oligonucleotide
  source 1..19: mol_type = other RNA
cccagaagccaatgagcag

SEQ ID NO: 1234 - RNA, 19 nt, synthetic construct
  misc_feature 1..19: note = Description of Artificial Sequence: Synthetic oligonucleotide
  source 1..19: mol_type = other RNA
tggtaggtctcattgaagg

SEQ ID NO: 1235 - RNA, 19 nt, synthetic construct
  misc_feature 1..19: note = Description of Artificial Sequence: Synthetic oligonucleotide
  source 1..19: mol_type = other RNA
ggcccttgaagtaaatggt

SEQ ID NO: 1236 - RNA, 19 nt, synthetic construct
  misc_feature 1..19: note = Description of Artificial Sequence: Synthetic oligonucleotide
  source 1..19: mol_type = other RNA
caaaaataggaagaggtgc

SEQ ID NO: 1237 - RNA, 19 nt, synthetic construct
  misc_feature 1..19: note = Description of Artificial Sequence: Synthetic oligonucleotide
  source 1..19: mol_type = other RNA
cctgggtgccttcagccac

SEQ ID NO: 1238 - RNA, 19 nt, synthetic construct
  misc_feature 1..19: note = Description of Artificial Sequence: Synthetic oligonucleotide
  source 1..19: mol_type = other RNA
aagccgtcctcaatgcgga

SEQ ID NO: 1239 - RNA, 19 nt, synthetic construct
  misc_feature 1..19: note = Description of Artificial Sequence: Synthetic oligonucleotide
  source 1..19: mol_type = other RNA
ttggctgtgcagatgtcca

SEQ ID NO: 1240 - RNA, 19 nt, synthetic construct
  misc_feature 1..19: note = Description of Artificial Sequence: Synthetic oligonucleotide
  source 1..19: mol_type = other RNA
aatacctgggagtttggac

SEQ ID NO: 1241 - RNA, 19 nt, synthetic construct
  misc_feature 1..19: note = Description of Artificial Sequence: Synthetic oligonucleotide
  source 1..19: mol_type = other RNA
tctggggtgagttccttct

SEQ ID NO: 1242 - RNA, 19 nt, synthetic construct
  misc_feature 1..19: note = Description of Artificial Sequence: Synthetic oligonucleotide
  source 1..19: mol_type = other RNA
ttcttcatttacctcaaga

SEQ ID NO: 1243 - RNA, 19 nt, synthetic construct
  misc_feature 1..19: note = Description of Artificial Sequence: Synthetic oligonucleotide
  source 1..19: mol_type = other RNA
tgcagatgtccacagggct

SEQ ID NO: 1244 - RNA, 19 nt, synthetic construct
  misc_feature 1..19: note = Description of Artificial Sequence: Synthetic oligonucleotide
  source 1..19: mol_type = other RNA
tttgttgatggccgctctg

SEQ ID NO: 1245 - RNA, 19 nt, synthetic construct
  misc_feature 1..19: note = Description of Artificial Sequence: Synthetic oligonucleotide
  source 1..19: mol_type = other RNA
tatggtgtcaaacttaaat

SEQ ID NO: 1246 - RNA, 19 nt, synthetic construct
  misc_feature 1..19: note = Description of Artificial Sequence: Synthetic oligonucleotide
  source 1..19: mol_type = other RNA
cttggccaggctcttctca

SEQ ID NO: 1247 - RNA, 19 nt, synthetic construct
  misc_feature 1..19: note = Description of Artificial Sequence: Synthetic oligonucleotide
  source 1..19: mol_type = other RNA
aagatgaggaccatggtga

SEQ ID NO: 1248 - RNA, 19 nt, synthetic construct
  misc_feature 1..19: note = Description of Artificial Sequence: Synthetic oligonucleotide
  source 1..19: mol_type = other RNA
ttgtagaacagttccttcc

SEQ ID NO: 1249 - RNA, 19 nt, synthetic construct
  misc_feature 1..19: note = Description of Artificial Sequence: Synthetic oligonucleotide
  source 1..19: mol_type = other RNA
cttctcttataaaaaccag

SEQ ID NO: 1250 - RNA, 19 nt, synthetic construct
  misc_feature 1..19: note = Description of Artificial Sequence: Synthetic oligonucleotide
  source 1..19: mol_type = other RNA
tgtcattacaggcacccag

SEQ ID NO: 1251 - RNA, 19 nt, synthetic construct
  misc_feature 1..19: note = Description of Artificial Sequence: Synthetic oligonucleotide
  source 1..19: mol_type = other RNA
gcaatcacaacagcggtac

SEQ ID NO: 1252 - RNA, 19 nt, synthetic construct
  misc_feature 1..19: note = Description of Artificial Sequence: Synthetic oligonucleotide
  source 1..19: mol_type = other RNA
tctgccaggtgctgataga

SEQ ID NO: 1253 - RNA, 19 nt, synthetic construct
  misc_feature 1..19: note = Description of Artificial Sequence: Synthetic oligonucleotide
  source 1..19: mol_type = other RNA
cattcttggaatctgccag

SEQ ID NO: 1254 - RNA, 19 nt, synthetic construct
  misc_feature 1..19: note = Description of Artificial Sequence: Synthetic oligonucleotide
  source 1..19: mol_type = other RNA
ttccgagggaatgacatcg

SEQ ID NO: 1255 - RNA, 19 nt, synthetic construct
  misc_feature 1..19: note = Description of Artificial Sequence: Synthetic oligonucleotide
  source 1..19: mol_type = other RNA
gtcacgcagtcccagaagc

SEQ ID NO: 1256 - RNA, 19 nt, synthetic construct
  misc_feature 1..19: note = Description of Artificial Sequence: Synthetic oligonucleotide
  source 1..19: mol_type = other RNA
acagggctcccgtgacagg

SEQ ID NO: 1257 - RNA, 19 nt, synthetic construct
  misc_feature 1..19: note = Description of Artificial Sequence: Synthetic oligonucleotide
  source 1..19: mol_type = other RNA
acaggcccttgaagtaaat

SEQ ID NO: 1258 - RNA, 19 nt, synthetic construct
  misc_feature 1..19: note = Description of Artificial Sequence: Synthetic oligonucleotide
  source 1..19: mol_type = other RNA
ctgatagaaagtggtagca

SEQ ID NO: 1259 - RNA, 19 nt, synthetic construct
  misc_feature 1..19: note = Description of Artificial Sequence: Synthetic oligonucleotide
  source 1..19: mol_type = other RNA
attggccttggacagttcc

SEQ ID NO: 1260 - RNA, 19 nt, synthetic construct
  misc_feature 1..19: note = Description of Artificial Sequence: Synthetic oligonucleotide
  source 1..19: mol_type = other RNA
actaacttggaggatttgt

SEQ ID NO: 1261 - RNA, 19 nt, synthetic construct
  misc_feature 1..19: note = Description of Artificial Sequence: Synthetic oligonucleotide
  source 1..19: mol_type = other RNA
tctccggggagcggtaaat

SEQ ID NO: 1262 - RNA, 19 nt, synthetic construct
  misc_feature 1..19: note = Description of Artificial Sequence: Synthetic oligonucleotide
  source 1..19: mol_type = other RNA
cgtggagatactcaggggt

SEQ ID NO: 1263 - RNA, 19 nt, synthetic construct
  misc_feature 1..19: note = Description of Artificial Sequence: Synthetic oligonucleotide
  source 1..19: mol_type = other RNA
tgggcaagtggagatagtg

SEQ ID NO: 1264 - RNA, 19 nt, synthetic construct
  misc_feature 1..19: note = Description of Artificial Sequence: Synthetic oligonucleotide
  source 1..19: mol_type = other RNA
atggaagtagtttgtattt

SEQ ID NO: 1265 - RNA, 19 nt, synthetic construct
  misc_feature 1..19: note = Description of Artificial Sequence: Synthetic oligonucleotide
  source 1..19: mol_type = other RNA
agtaaatggtgttaaccag

SEQ ID NO: 1266 - RNA, 19 nt, synthetic construct
  misc_feature 1..19: note = Description of Artificial Sequence: Synthetic oligonucleotide
  source 1..19: mol_type = other RNA
tcaggcttgggcaagatga

SEQ ID NO: 1267 - RNA, 19 nt, synthetic construct
  misc_feature 1..19: note = Description of Artificial Sequence: Synthetic oligonucleotide
  source 1..19: mol_type = other RNA
gagatagtgtgatctgagg

SEQ ID NO: 1268 - RNA, 19 nt, synthetic construct
  misc_feature 1..19: note = Description of Artificial Sequence: Synthetic oligonucleotide
  source 1..19: mol_type = other RNA
cagaggttccagaggacag

SEQ ID NO: 1269 - RNA, 19 nt, synthetic construct
  misc_feature 1..19: note = Description of Artificial Sequence: Synthetic oligonucleotide
  source 1..19: mol_type = other RNA
ccgctaatcttccacaggg

SEQ ID NO: 1270 - RNA, 19 nt, synthetic construct
  misc_feature 1..19: note = Description of Artificial Sequence: Synthetic oligonucleotide
  source 1..19: mol_type = other RNA
tagcaaaagccgtggagat

SEQ ID NO: 1271 - RNA, 19 nt, synthetic construct
  misc_feature 1..19: note = Description of Artificial Sequence: Synthetic oligonucleotide
  source 1..19: mol_type = other RNA
ctccaattcatccagccac

SEQ ID NO: 1272 - RNA, 19 nt, synthetic construct
  misc_feature 1..19: note = Description of Artificial Sequence: Synthetic oligonucleotide
  source 1..19: mol_type = other RNA
attggctgatactaacttg

SEQ ID NO: 1273 - RNA, 19 nt, synthetic construct
  misc_feature 1..19: note = Description of Artificial Sequence: Synthetic oligonucleotide
  source 1..19: mol_type = other RNA
accatggtgatgtcatcac

SEQ ID NO: 1274 - RNA, 19 nt, synthetic construct
  misc_feature 1..19: note = Description of Artificial Sequence: Synthetic oligonucleotide
  source 1..19: mol_type = other RNA
atcattgtcattcttggaa

SEQ ID NO: 1275 - RNA, 19 nt, synthetic construct
  misc_feature 1..19: note = Description of Artificial Sequence: Synthetic oligonucleotide
  source 1..19: mol_type = other RNA
aacttaaatacctccatca

SEQ ID NO: 1276 - RNA, 19 nt, synthetic construct
  misc_feature 1..19: note = Description of Artificial Sequence: Synthetic oligonucleotide
  source 1..19: mol_type = other RNA
tcctatcacattggaatac

SEQ ID NO: 1277 - RNA, 19 nt, synthetic construct
  misc_feature 1..19: note = Description of Artificial Sequence: Synthetic oligonucleotide
  source 1..19: mol_type = other RNA
atgtcccgcggcttggctg

SEQ ID NO: 1278 - RNA, 19 nt, synthetic construct
  misc_feature 1..19: note = Description of Artificial Sequence: Synthetic oligonucleotide
  source 1..19: mol_type = other RNA
aatgcggaagcggggcatg

SEQ ID NO: 1279 - RNA, 19 nt, synthetic construct
  misc_feature 1..19: note = Description of Artificial Sequence: Synthetic oligonucleotide
  source 1..19: mol_type = other RNA
gttacagttcctatcacat

SEQ ID NO: 1280 - RNA, 19 nt, synthetic construct
  misc_feature 1..19: note = Description of Artificial Sequence: Synthetic oligonucleotide
  source 1..19: mol_type = other RNA
ttgaaggtaagggatttgt

SEQ ID NO: 1281 - RNA, 19 nt, synthetic construct
  misc_feature 1..19: note = Description of Artificial Sequence: Synthetic oligonucleotide
  source 1..19: mol_type = other RNA
aaggacaaaagataaacct

SEQ ID NO: 1282 - RNA, 19 nt, synthetic construct
  misc_feature 1..19: note = Description of Artificial Sequence: Synthetic oligonucleotide
  source 1..19: mol_type = other RNA
ttggtggcctccgggatct

SEQ ID NO: 1283 - RNA, 19 nt, synthetic construct
  misc_feature 1..19: note = Description of Artificial Sequence: Synthetic oligonucleotide
  source 1..19: mol_type = other RNA
aggggtgacaggaaaatgt

SEQ ID NO: 1284 - RNA, 19 nt, synthetic construct
  misc_feature 1..19: note = Description of Artificial Sequence: Synthetic oligonucleotide
  source 1..19: mol_type = other RNA
ataaaaaccaggaaaggcc

SEQ ID NO: 1285 - RNA, 19 nt, synthetic construct
  misc_feature 1..19: note = Description of Artificial Sequence: Synthetic oligonucleotide
  source 1..19: mol_type = other RNA
aacattttacttaacacaa

SEQ ID NO: 1286 - RNA, 19 nt, synthetic construct
  misc_feature 1..19: note = Description of Artificial Sequence: Synthetic oligonucleotide
  source 1..19: mol_type = other RNA
ttgctctgcattttccttg

SEQ ID NO: 1287 - RNA, 19 nt, synthetic construct
  misc_feature 1..19: note = Description of Artificial Sequence: Synthetic oligonucleotide
  source 1..19: mol_type = other RNA
tgatcagatgttttctcag

SEQ ID NO: 1288 - RNA, 19 nt, synthetic construct
  misc_feature 1..19: note = Description of Artificial Sequence: Synthetic oligonucleotide
  source 1..19: mol_type = other RNA
ccacaggcccttgaagtaa

SEQ ID NO: 1289 - RNA, 19 nt, synthetic construct
  misc_feature 1..19: note = Description of Artificial Sequence: Synthetic oligonucleotide
  source 1..19: mol_type = other RNA
aaagtcaccctgttggggt

SEQ ID NO: 1290 - RNA, 19 nt, synthetic construct
  misc_feature 1..19: note = Description of Artificial Sequence: Synthetic oligonucleotide
  source 1..19: mol_type = other RNA
cttctgcaacaatacctgg

SEQ ID NO: 1291 - RNA, 19 nt, synthetic construct
  misc_feature 1..19: note = Description of Artificial Sequence: Synthetic oligonucleotide
  source 1..19: mol_type = other RNA
aactttgacttccacaggc

SEQ ID NO: 1292 - RNA, 19 nt, synthetic construct
  misc_feature 1..19: note = Description of Artificial Sequence: Synthetic oligonucleotide
  source 1..19: mol_type = other RNA
aaatctcgcagaggttcca

SEQ ID NO: 1293 - RNA, 19 nt, synthetic construct
  misc_feature 1..19: note = Description of Artificial Sequence: Synthetic oligonucleotide
  source 1..19: mol_type = other RNA
tccttgtgttctcagggct

SEQ ID NO: 1294 - RNA, 19 nt, synthetic construct
  misc_feature 1..19: note = Description of Artificial Sequence: Synthetic oligonucleotide
  source 1..19: mol_type = other RNA
atgcatctgagacatagag

SEQ ID NO: 1295 - RNA, 19 nt, synthetic construct
  misc_feature 1..19: note = Description of Artificial Sequence: Synthetic oligonucleotide
  source 1..19: mol_type = other RNA
tgattcggccttcggtctt

SEQ ID NO: 1296 - RNA, 19 nt, synthetic construct
  misc_feature 1..19: note = Description of Artificial Sequence: Synthetic oligonucleotide
  source 1..19: mol_type = other RNA
aaagaataagaacatttta

SEQ ID NO: 1297 - RNA, 19 nt, synthetic construct
  misc_feature 1..19: note = Description of Artificial Sequence: Synthetic oligonucleotide
  source 1..19: mol_type = other RNA
aaaccttcctttttccaga

SEQ ID NO: 1298 - RNA, 19 nt, synthetic construct
  misc_feature 1..19: note = Description of Artificial Sequence: Synthetic oligonucleotide
  source 1..19: mol_type = other RNA
aaggcctgttggccttgaa

SEQ ID NO: 1299 - RNA, 19 nt, synthetic construct
  misc_feature 1..19: note = Description of Artificial Sequence: Synthetic oligonucleotide
  source 1..19: mol_type = other RNA
agggctgaactttgacttc

SEQ ID NO: 1300 - RNA, 19 nt, synthetic construct
  misc_feature 1..19: note = Description of Artificial Sequence: Synthetic oligonucleotide
  source 1..19: mol_type = other RNA
acagtgagctcattgatgg

SEQ ID NO: 1301 - RNA, 19 nt, synthetic construct
  misc_feature 1..19: note = Description of Artificial Sequence: Synthetic oligonucleotide
  source 1..19: mol_type = other RNA
aagataatagtgttcagag

SEQ ID NO: 1302 - RNA, 19 nt, synthetic construct
  misc_feature 1..19: note = Description of Artificial Sequence: Synthetic oligonucleotide
  source 1..19: mol_type = other RNA
taaatggtgttaaccagca

SEQ ID NO: 1303 - RNA, 19 nt, synthetic construct
  misc_feature 1..19: note = Description of Artificial Sequence: Synthetic oligonucleotide
  source 1..19: mol_type = other RNA
aaaactggttctttcctct

SEQ ID NO: 1304 - RNA, 19 nt, synthetic construct
  misc_feature 1..19: note = Description of Artificial Sequence: Synthetic oligonucleotide
  source 1..19: mol_type = other RNA
tcttccacagggctgggca

SEQ ID NO: 1305 - RNA, 21 nt, synthetic construct
  modified_base 20..21: mod_base = OTHER; note = thymine
  misc_feature 1..21: note = Description of Artificial Sequence: Synthetic oligonucleotide
  misc_feature 1..21: note = Description of Combined DNA/RNA Molecule: Synthetic oligonucleotide
  source 1..21: mol_type = other RNA
ggagaagaaggcaactgagtt

SEQ ID NO: 1306 - RNA, 21 nt, synthetic construct
  modified_base 20..21: mod_base = OTHER; note = thymine
  misc_feature 1..21: note = Description of Artificial Sequence: Synthetic oligonucleotide
  misc_feature 1..21: note = Description of Combined DNA/RNA Molecule: Synthetic oligonucleotide
  source 1..21: mol_type = other RNA
tgaccaagctgggtgcctgtt

SEQ ID NO: 1307 - RNA, 21 nt, synthetic construct
  modified_base 20..21: mod_base = OTHER; note = thymine
  misc_feature 1..21: note = Description of Artificial Sequence: Synthetic oligonucleotide
  misc_feature 1..21: note = Description of Combined DNA/RNA Molecule: Synthetic oligonucleotide
  source 1..21: mol_type = other RNA
ggttaacaccatttacttctt

SEQ ID NO: 1308 - RNA, 21 nt, synthetic construct
  modified_base 20..21: mod_base = OTHER; note = thymine
  misc_feature 1..21: note = Description of Artificial Sequence: Synthetic oligonucleotide
  misc_feature 1..21: note = Description of Combined DNA/RNA Molecule: Synthetic oligonucleotide
  source 1..21: mol_type = other RNA
gctggttaacaccatttactt

SEQ ID NO: 1309 - RNA, 21 nt, synthetic construct
  modified_base 20..21: mod_base = OTHER; note = thymine
  misc_feature 1..21: note = Description of Artificial Sequence: Synthetic oligonucleotide
  misc_feature 1..21: note = Description of Combined DNA/RNA Molecule: Synthetic oligonucleotide
  source 1..21: mol_type = other RNA
taatgacaccctccagcaatt

SEQ ID NO: 1310 - RNA, 21 nt, synthetic construct
  modified_base 20..21: mod_base = OTHER; note = thymine
  misc_feature 1..21: note = Description of Artificial Sequence: Synthetic oligonucleotide
  misc_feature 1..21: note = Description of Combined DNA/RNA Molecule: Synthetic oligonucleotide
  source 1..21: mol_type = other RNA
cgtgttcagcatctatgattt

SEQ ID NO: 1311 - RNA, 21 nt, synthetic construct
  modified_base 20..21: mod_base = OTHER; note = thymine
  misc_feature 1..21: note = Description of Artificial Sequence: Synthetic oligonucleotide
  misc_feature 1..21: note = Description of Combined DNA/RNA Molecule: Synthetic oligonucleotide
  source 1..21: mol_type = other RNA
ttgaggacggcttcagttttt

SEQ ID NO: 1312 - RNA, 21 nt, synthetic construct
  modified_base 20..21: mod_base = OTHER; note = thymine
  misc_feature 1..21: note = Description of Artificial Sequence: Synthetic oligonucleotide
  misc_feature 1..21: note = Description of Combined DNA/RNA Molecule: Synthetic oligonucleotide
  source 1..21: mol_type = other RNA
cggcgtgtctgggaactgttt

SEQ ID NO: 1313 - RNA, 21 nt, synthetic construct
  modified_base 20..21: mod_base = OTHER; note = thymine
  misc_feature 1..21: note = Description of Artificial Sequence: Synthetic oligonucleotide
  misc_feature 1..21: note = Description of Combined DNA/RNA Molecule: Synthetic oligonucleotide
  source 1..21: mol_type = other RNA
ttaacaccatttacttcaatt

SEQ ID NO: 1314 - RNA, 21 nt, synthetic construct
  modified_base 20..21: mod_base = OTHER; note = thymine
  misc_feature 1..21: note = Description of Artificial Sequence: Synthetic oligonucleotide
  misc_feature 1..21: note = Description of Combined DNA/RNA Molecule: Synthetic oligonucleotide
  source 1..21: mol_type = other RNA
ccctgaaaagtccaaactctt

SEQ ID NO: 1315 - RNA, 21 nt, synthetic construct
  modified_base 20..21: mod_base = OTHER; note = thymine
  misc_feature 1..21: note = Description of Artificial Sequence: Synthetic oligonucleotide
  misc_feature 1..21: note = Description of Combined DNA/RNA Molecule: Synthetic oligonucleotide
  source 1..21: mol_type = other RNA
cgagatgacctctatgtcttt

SEQ ID NO: 1316 - RNA, 21 nt, synthetic construct
  modified_base 20..21: mod_base = OTHER; note = thymine
  misc_feature 1..21: note = Description of Artificial Sequence: Synthetic oligonucleotide
  misc_feature 1..21: note = Description of Combined DNA/RNA Molecule: Synthetic oligonucleotide
  source 1..21: mol_type = other RNA
tctacaaggctgatggagatt

SEQ ID NO: 1317 - RNA, 21 nt, synthetic construct
  modified_base 20..21: mod_base = OTHER; note = thymine
  misc_feature 1..21: note = Description of Artificial Sequence: Synthetic oligonucleotide
  misc_feature 1..21: note = Description of Combined DNA/RNA Molecule: Synthetic oligonucleotide
  source 1..21: mol_type = other RNA
agctcactgttctggtgcttt

SEQ ID NO: 1318 - RNA, 21 nt, synthetic construct
  modified_base 20..21: mod_base = OTHER; note = thymine
  misc_feature 1..21: note = Description of Artificial Sequence: Synthetic oligonucleotide
  misc_feature 1..21: note = Description of Combined DNA/RNA Molecule: Synthetic oligonucleotide
  source 1..21: mol_type = other RNA
aggagcagctgcaagacattt

SEQ ID NO: 1319 - RNA, 21 nt, synthetic construct
  modified_base 20..21: mod_base = OTHER; note = thymine
  misc_feature 1..21: note = Description of Artificial Sequence: Synthetic oligonucleotide
  misc_feature 1..21: note = Description of Combined DNA/RNA Molecule: Synthetic oligonucleotide
  source 1..21: mol_type = other RNA
gccaccaaccggcgtgtcttt

SEQ ID NO: 1320 - RNA, 21 nt, synthetic construct
  modified_base 20..21: mod_base = OTHER; note = thymine
  misc_feature 1..21: note = Description of Artificial Sequence: Synthetic oligonucleotide
  misc_feature 1..21: note = Description of Combined DNA/RNA Molecule: Synthetic oligonucleotide
  source 1..21: mol_type = other RNA
cagaacagaagatcccggatt

SEQ ID NO: 1321 - RNA, 21 nt, synthetic construct
  modified_base 20..21: mod_base = OTHER; note = thymine
  misc_feature 1..21: note = Description of Artificial Sequence: Synthetic oligonucleotide
  misc_feature 1..21: note = Description of Combined DNA/RNA Molecule: Synthetic oligonucleotide
  source 1..21: mol_type = other RNA
ccttgtcgatctgttcagctt

SEQ ID NO: 1322 - RNA, 21 nt, synthetic construct
  modified_base 20..21: mod_base = OTHER; note = thymine
  misc_feature 1..21: note = Description of Artificial Sequence: Synthetic oligonucleotide
  misc_feature 1..21: note = Description of Combined DNA/RNA Molecule: Synthetic oligonucleotide
  source 1..21: mol_type = other RNA
aggcaagttccgttatcggtt

SEQ ID NO: 1323 - RNA, 21 nt, synthetic construct
  modified_base 20..21: mod_base = OTHER; note = thymine
  misc_feature 1..21: note = Description of Artificial Sequence: Synthetic oligonucleotide
  misc_feature 1..21: note = Description of Combined DNA/RNA Molecule: Synthetic oligonucleotide
  source 1..21: mol_type = other RNA
ttttgtccttgctgctcattt

SEQ ID NO: 1324 - RNA, 21 nt, synthetic construct
  modified_base 20..21: mod_base = OTHER; note = thymine
  misc_feature 1..21: note = Description of Artificial Sequence: Synthetic oligonucleotide
  misc_feature 1..21: note = Description of Combined DNA/RNA Molecule: Synthetic oligonucleotide
  source 1..21: mol_type = other RNA
agacctaccaggacatcagtt

SEQ ID NO: 1325 - RNA, 21 nt, synthetic construct
  modified_base 20..21: mod_base = OTHER; note = thymine
  misc_feature 1..21: note = Description of Artificial Sequence: Synthetic oligonucleotide
  misc_feature 1..21: note = Description of Combined DNA/RNA Molecule: Synthetic oligonucleotide
  source 1..21: mol_type = other RNA
aactgaactgccgactctatt

SEQ ID NO: 1326 - RNA, 21 nt, synthetic construct
  modified_base 20..21: mod_base = OTHER; note = thymine
  misc_feature 1..21: note = Description of Artificial Sequence: Synthetic oligonucleotide
  misc_feature 1..21: note = Description of Combined DNA/RNA Molecule: Synthetic oligonucleotide
  source 1..21: mol_type = other RNA
catttacttcaagggcctgtt

SEQ ID NO: 1327 - RNA, 21 nt, synthetic construct
  modified_base 20..21: mod_base = OTHER; note = thymine
  misc_feature 1..21: note = Description of Artificial Sequence: Synthetic oligonucleotide
  misc_feature 1..21: note = Description of Combined DNA/RNA Molecule: Synthetic oligonucleotide
  source 1..21: mol_type = other RNA
ccctggacttcaaggaaaatt

SEQ ID NO: 1328 - RNA, 21 nt, synthetic construct
  modified_base 20..21: mod_base = OTHER; note = thymine
  misc_feature 1..21: note = Description of Artificial Sequence: Synthetic oligonucleotide
  misc_feature 1..21: note = Description of Combined DNA/RNA Molecule: Synthetic oligonucleotide
  source 1..21: mol_type = other RNA
agctgcaagtaccgctgtttt

SEQ ID NO: 1329 - RNA, 21 nt, synthetic construct
  modified_base 20..21: mod_base = OTHER; note = thymine
  misc_feature 1..21: note = Description of Artificial Sequence: Synthetic oligonucleotide
  misc_feature 1..21: note = Description of Combined DNA/RNA Molecule: Synthetic oligonucleotide
  source 1..21: mol_type = other RNA
acacaaggaaggaactgtttt

SEQ ID NO: 1330 - RNA, 21 nt, synthetic construct
  modified_base 20..21: mod_base = OTHER; note = thymine
  misc_feature 1..21: note = Description of Artificial Sequence: Synthetic oligonucleotide
  misc_feature 1..21: note = Description of Combined DNA/RNA Molecule: Synthetic oligonucleotide
  source 1..21: mol_type = other RNA
gcaactgaggatgagggcttt

SEQ ID NO: 1331 - RNA, 21 nt, synthetic construct
  modified_base 20..21: mod_base = OTHER; note = thymine
  misc_feature 1..21: note = Description of Artificial Sequence: Synthetic oligonucleotide
  misc_feature 1..21: note = Description of Combined DNA/RNA Molecule: Synthetic oligonucleotide
  source 1..21: mol_type = other RNA
gtagccaacccttgtgttatt

SEQ ID NO: 1332 - RNA, 21 nt, synthetic construct
  modified_base 20..21: mod_base = OTHER; note = thymine
  misc_feature 1..21: note = Description of Artificial Sequence: Synthetic oligonucleotide
  misc_feature 1..21: note = Description of Combined DNA/RNA Molecule: Synthetic oligonucleotide
  source 1..21: mol_type = other RNA
gtttgtgaacagaagtaaatt

SEQ ID NO: 1333 - RNA, 21 nt, synthetic construct
  modified_base 20..21: mod_base = OTHER; note = thymine
  misc_feature 1..21: note = Description of Artificial Sequence: Synthetic oligonucleotide
  misc_feature 1..21: note = Description of Combined DNA/RNA Molecule: Synthetic oligonucleotide
  source 1..21: mol_type = other RNA
gggtgactttcaaggccaatt

SEQ ID NO: 1334 - RNA, 21 nt, synthetic construct
  modified_base 20..21: mod_base = OTHER; note = thymine
  misc_feature 1..21: note = Description of Artificial Sequence: Synthetic oligonucleotide
  misc_feature 1..21: note = Description of Combined DNA/RNA Molecule: Synthetic oligonucleotide
  source 1..21: mol_type = other RNA
ttatcggcgcgtggctgaatt

SEQ ID NO: 1335 - RNA, 21 nt, synthetic construct
  modified_base 20..21: mod_base = OTHER; note = thymine
  misc_feature 1..21: note = Description of Artificial Sequence: Synthetic oligonucleotide
  misc_feature 1..21: note = Description of Combined DNA/RNA Molecule: Synthetic oligonucleotide
  source 1..21: mol_type = other RNA
ccacttcttctttgccaaatt

SEQ ID NO: 1336 - RNA, 21 nt, synthetic construct
  modified_base 20..21: mod_base = OTHER; note = thymine
  misc_feature 1..21: note = Description of Artificial Sequence: Synthetic oligonucleotide
  misc_feature 1..21: note = Description of Combined DNA/RNA Molecule: Synthetic oligonucleotide
  source 1..21: mol_type = other RNA
aacaccatttacttcaaggtt

SEQ ID NO: 1337 - RNA, 21 nt, synthetic construct
  modified_base 20..21: mod_base = OTHER; note = thymine
  misc_feature 1..21: note = Description of Artificial Sequence: Synthetic oligonucleotide
  misc_feature 1..21: note = Description of Combined DNA/RNA Molecule: Synthetic oligonucleotide
  source 1..21: mol_type = other RNA
gatggagagtcgtgttcagtt

SEQ ID NO: 1338 - RNA, 21 nt, synthetic construct
  modified_base 20..21: mod_base = OTHER; note = thymine
  misc_feature 1..21: note = Description of Artificial Sequence: Synthetic oligonucleotide
  misc_feature 1..21: note = Description of Combined DNA/RNA Molecule: Synthetic oligonucleotide
  source 1..21: mol_type = other RNA
caccatttacttcaagggctt

SEQ ID NO: 1339 - RNA, 21 nt, synthetic construct
  modified_base 20..21: mod_base = OTHER; note = thymine
  misc_feature 1..21: note = Description of Artificial Sequence: Synthetic oligonucleotide
  misc_feature 1..21: note = Description of Combined DNA/RNA Molecule: Synthetic oligonucleotide
  source 1..21: mol_type = other RNA
tttacttcaagggcctgtgtt

SEQ ID NO: 1340 - RNA, 21 nt, synthetic construct
  modified_base 20..21: mod_base = OTHER; note = thymine
  misc_feature 1..21: note = Description of Artificial Sequence: Synthetic oligonucleotide
  misc_feature 1..21: note = Description of Combined DNA/RNA Molecule: Synthetic oligonucleotide
  source 1..21: mol_type = other RNA
taagagaagttcctctgaatt

SEQ ID NO: 1341 - RNA, 21 nt, synthetic construct
  modified_base 20..21: mod_base = OTHER; note = thymine
  misc_feature 1..21: note = Description of Artificial Sequence: Synthetic oligonucleotide
  misc_feature 1..21: note = Description of Combined DNA/RNA Molecule: Synthetic oligonucleotide
  source 1..21: mol_type = other RNA
gcgggacattcccatgaattt

SEQ ID NO: 1342 - RNA, 21 nt, synthetic construct
  modified_base 20..21: mod_base = OTHER; note = thymine
  misc_feature 1..21: note = Description of Artificial Sequence: Synthetic oligonucleotide
  misc_feature 1..21: note = Description of Combined DNA/RNA Molecule: Synthetic oligonucleotide
  source 1..21: mol_type = other RNA
tgccccaccctgtcctctgtt

SEQ ID NO: 1343 - RNA, 21 nt, synthetic construct
  modified_base 20..21: mod_base = OTHER; note = thymine
  misc_feature 1..21: note = Description of Artificial Sequence: Synthetic oligonucleotide
  misc_feature 1..21: note = Description of Combined DNA/RNA Molecule: Synthetic oligonucleotide
  source 1..21: mol_type = other RNA
tggttaacaccatttactttt

SEQ ID NO: 1344 - RNA, 21 nt, synthetic construct
  modified_base 20..21: mod_base = OTHER; note = thymine
  misc_feature 1..21: note = Description of Artificial Sequence: Synthetic oligonucleotide
  misc_feature 1..21: note = Description of Combined DNA/RNA Molecule: Synthetic oligonucleotide
  source 1..21: mol_type = other RNA
cggattgcctcagatcacatt

SEQ ID NO: 1345 - RNA, 21 nt, synthetic construct
  modified_base 20..21: mod_base = OTHER; note = thymine
  misc_feature 1..21: note = Description of Artificial Sequence: Synthetic oligonucleotide
  misc_feature 1..21: note = Description of Combined DNA/RNA Molecule: Synthetic oligonucleotide
  source 1..21: mol_type = other RNA
ccaggacatcagtgagttgtt

SEQ ID NO: 1346 - RNA, 21 nt, synthetic construct
  modified_base 20..21: mod_base = OTHER; note = thymine
  misc_feature 1..21: note = Description of Artificial Sequence: Synthetic oligonucleotide
  misc_feature 1..21: note = Description of Combined DNA/RNA Molecule: Synthetic oligonucleotide
  source 1..21: mol_type = other RNA
ccagttttcaggcggattgtt

SEQ ID NO: 1347 - RNA, 21 nt, synthetic construct
  modified_base 20..21: mod_base = OTHER; note = thymine
  misc_feature 1..21: note = Description of Artificial Sequence: Synthetic oligonucleotide
  misc_feature 1..21: note = Description of Combined DNA/RNA Molecule: Synthetic oligonucleotide
  source 1..21: mol_type = other RNA
caccatatctgagaaaacatt

SEQ ID NO: 1348 - RNA, 21 nt, synthetic construct
  modified_base 20..21: mod_base = OTHER; note = thymine
  misc_feature 1..21: note = Description of Artificial Sequence: Synthetic oligonucleotide
  misc_feature 1..21: note = Description of Combined DNA/RNA Molecule: Synthetic oligonucleotide
  source 1..21: mol_type = other RNA
aagtaaaaataaatacaaatt

SEQ ID NO: 1349 - RNA, 21 nt, synthetic construct
  modified_base 20..21: mod_base = OTHER; note = thymine
  misc_feature 1..21: note = Description of Artificial Sequence: Synthetic oligonucleotide
  misc_feature 1..21: note = Description of Combined DNA/RNA Molecule: Synthetic oligonucleotide
  source 1..21: mol_type = other RNA
gcacccaggtgcttgagtttt

SEQ ID NO: 1350 - RNA, 21 nt, synthetic construct
  modified_base 20..21: mod_base = OTHER; note = thymine
  misc_feature 1..21: note = Description of Artificial Sequence: Synthetic oligonucleotide
  misc_feature 1..21: note = Description of Combined DNA/RNA Molecule: Synthetic oligonucleotide
  source 1..21: mol_type = other RNA
taacaccatttacttcaagtt

SEQ ID NO: 1351 - RNA, 21 nt, synthetic construct
  modified_base 20..21: mod_base = OTHER; note = thymine
  misc_feature 1..21: note = Description of Artificial Sequence: Synthetic oligonucleotide
  misc_feature 1..21: note = Description of Combined DNA/RNA Molecule: Synthetic oligonucleotide
  source 1..21: mol_type = other RNA
ccttcaaaggtgatgacattt

SEQ ID NO: 1352 - RNA, 21 nt, synthetic construct
  modified_base 20..21: mod_base = OTHER; note = thymine
  misc_feature 1..21: note = Description of Artificial Sequence: Synthetic oligonucleotide
  misc_feature 1..21: note = Description of Combined DNA/RNA Molecule: Synthetic oligonucleotide
  source 1..21: mol_type = other RNA
caaggccaattcccgcttttt

SEQ ID NO: 1353 - RNA, 21 nt, synthetic construct
  modified_base 20..21: mod_base = OTHER; note = thymine
  misc_feature 1..21: note = Description of Artificial Sequence: Synthetic oligonucleotide
  misc_feature 1..21: note = Description of Combined DNA/RNA Molecule: Synthetic oligonucleotide
  source 1..21: mol_type = other RNA
tcagtttgaaggagcagcttt

SEQ ID NO: 1354 - RNA, 21 nt, synthetic construct
  modified_base 20..21: mod_base = OTHER; note = thymine
  misc_feature 1..21: note = Description of Artificial Sequence: Synthetic oligonucleotide
  misc_feature 1..21: note = Description of Combined DNA/RNA Molecule: Synthetic oligonucleotide
  source 1..21: mol_type = other RNA
gggactgcgtgacctgtcatt

SEQ ID NO: 1355 - RNA, 21 nt, synthetic construct
  modified_base 20..21: mod_base = OTHER; note = thymine
  misc_feature 1..21: note = Description of Artificial Sequence: Synthetic oligonucleotide
  misc_feature 1..21: note = Description of Combined DNA/RNA Molecule: Synthetic oligonucleotide
  source 1..21: mol_type = other RNA
tcagccaatcgcctttttgtt

SEQ ID NO: 1356 - RNA, 21 nt, synthetic construct
  modified_base 20..21: mod_base = OTHER; note = thymine
  misc_feature 1..21: note = Description of Artificial Sequence: Synthetic oligonucleotide
  misc_feature 1..21: note = Description of Combined DNA/RNA Molecule: Synthetic oligonucleotide
  source 1..21: mol_type = other RNA
cctcggaagccatcaatgatt

SEQ ID NO: 1357 - RNA, 21 nt, synthetic construct
  modified_base 20..21: mod_base = OTHER; note = thymine
  misc_feature 1..21: note = Description of Artificial Sequence: Synthetic oligonucleotide
  misc_feature 1..21: note = Description of Combined DNA/RNA Molecule: Synthetic oligonucleotide
  source 1..21: mol_type = other RNA
gacaatgataacattttcctt

SEQ ID NO: 1358 - RNA, 21 nt, synthetic construct
  modified_base 20..21: mod_base = OTHER; note = thymine
  misc_feature 1..21: note = Description of Artificial Sequence: Synthetic oligonucleotide
  misc_feature 1..21: note = Description of Combined DNA/RNA Molecule: Synthetic oligonucleotide
  source 1..21: mol_type = other RNA
cttattctttgcacctctttt

SEQ ID NO: 1359 - RNA, 21 nt, synthetic construct
  modified_base 20..21: mod_base = OTHER; note = thymine
  misc_feature 1..21: note = Description of Artificial Sequence: Synthetic oligonucleotide
  misc_feature 1..21: note = Description of Combined DNA/RNA Molecule: Synthetic oligonucleotide
  source 1..21: mol_type = other RNA
attgctggccgttcgctaatt

SEQ ID NO: 1360 - RNA, 21 nt, synthetic construct
  modified_base 20..21: mod_base = OTHER; note = thymine
  misc_feature 1..21: note = Description of Artificial Sequence: Synthetic oligonucleotide
  misc_feature 1..21: note = Description of Combined DNA/RNA Molecule: Synthetic oligonucleotide
  source 1..21: mol_type = other RNA
aaatgaagaaggcagtgaatt

SEQ ID NO: 1361 - RNA, 21 nt, synthetic construct
  modified_base 20..21: mod_base = OTHER; note = thymine
  misc_feature 1..21: note = Description of Artificial Sequence: Synthetic oligonucleotide
  misc_feature 1..21: note = Description of Combined DNA/RNA Molecule: Synthetic oligonucleotide
  source 1..21: mol_type = other RNA
tgagttggtatatggagcctt

SEQ ID NO: 1362 - RNA, 21 nt, synthetic construct
  modified_base 20..21: mod_base = OTHER; note = thymine
  misc_feature 1..21: note = Description of Artificial Sequence: Synthetic oligonucleotide
  misc_feature 1..21: note = Description of Combined DNA/RNA Molecule: Synthetic oligonucleotide
  source 1..21: mol_type = other RNA
tccagcaactgatggaggttt

SEQ ID NO: 1363 - RNA, 21 nt, synthetic construct
  modified_base 20..21: mod_base = OTHER; note = thymine
  misc_feature 1..21: note = Description of Artificial Sequence: Synthetic oligonucleotide
  misc_feature 1..21: note = Description of Combined DNA/RNA Molecule: Synthetic oligonucleotide
  source 1..21: mol_type = other RNA
aactgtaacctctggaaaatt

SEQ ID NO: 1364 - RNA, 21 nt, synthetic construct
  modified_base 20..21: mod_base = OTHER; note = thymine
  misc_feature 1..21: note = Description of Artificial Sequence: Synthetic oligonucleotide
  misc_feature 1..21: note = Description of Combined DNA/RNA Molecule: Synthetic oligonucleotide
  source 1..21: mol_type = other RNA
tcaacaaatgggtgtccaatt

SEQ ID NO: 1365 - RNA, 21 nt, synthetic construct
  modified_base 20..21: mod_base = OTHER; note = thymine
  misc_feature 1..21: note = Description of Artificial Sequence: Synthetic oligonucleotide
  misc_feature 1..21: note = Description of Combined DNA/RNA Molecule: Synthetic oligonucleotide
  source 1..21: mol_type = other RNA
gattagcggccatgtattctt

SEQ ID NO: 1366 - RNA, 21 nt, synthetic construct
  modified_base 20..21: mod_base = OTHER; note = thymine
  misc_feature 1..21: note = Description of Artificial Sequence: Synthetic oligonucleotide
  misc_feature 1..21: note = Description of Combined DNA/RNA Molecule: Synthetic oligonucleotide
  source 1..21: mol_type = other RNA
gtgcttgagttgcccttcatt

SEQ ID NO: 1367 - RNA, 21 nt, synthetic construct
  modified_base 20..21: mod_base = OTHER; note = thymine
  misc_feature 1..21: note = Description of Artificial Sequence: Synthetic oligonucleotide
  misc_feature 1..21: note = Description of Combined DNA/RNA Molecule: Synthetic oligonucleotide
  source 1..21: mol_type = other RNA
tgcagaaggccgagatgactt

SEQ ID NO: 1368 - RNA, 21 nt, synthetic construct
  modified_base 20..21: mod_base = OTHER; note = thymine
  misc_feature 1..21: note = Description of Artificial Sequence: Synthetic oligonucleotide
  misc_feature 1..21: note = Description of Combined DNA/RNA Molecule: Synthetic oligonucleotide
  source 1..21: mol_type = other RNA
ctatttttggtttgtgaactt

SEQ ID NO: 1369 - RNA, 21 nt, synthetic construct
  modified_base 20..21: mod_base = OTHER; note = thymine
  misc_feature 1..21: note = Description of Artificial Sequence: Synthetic oligonucleotide
  misc_feature 1..21: note = Description of Combined DNA/RNA Molecule: Synthetic oligonucleotide
  source 1..21: mol_type = other RNA
cagtgaagcagctgcaagttt

SEQ ID NO: 1370 - RNA, 21 nt, synthetic construct
  modified_base 20..21: mod_base = OTHER; note = thymine
  misc_feature 1..21: note = Description of Artificial Sequence: Synthetic oligonucleotide
  misc_feature 1..21: note = Description of Combined DNA/RNA Molecule: Synthetic oligonucleotide
  source 1..21: mol_type = other RNA
gtgtccaataagaccgaagtt

SEQ ID NO: 1371 - RNA, 21 nt, synthetic construct
  modified_base 20..21: mod_base = OTHER; note = thymine
  misc_feature 1..21: note = Description of Artificial Sequence: Synthetic oligonucleotide
  misc_feature 1..21: note = Description of Combined DNA/RNA Molecule: Synthetic oligonucleotide
  source 1..21: mol_type = other RNA
atgaattggaggagatgattt

SEQ ID NO: 1372 - RNA, 21 nt, synthetic construct
  modified_base 20..21: mod_base = OTHER; note = thymine
  misc_feature 1..21: note = Description of Artificial Sequence: Synthetic oligonucleotide
  misc_feature 1..21: note = Description of Combined DNA/RNA Molecule: Synthetic oligonucleotide
  source 1..21: mol_type = other RNA
atctatgatgtaccaggaatt

SEQ ID NO: 1373 - RNA, 21 nt, synthetic construct
  modified_base 20..21: mod_base = OTHER; note = thymine
  misc_feature 1..21: note = Description of Artificial Sequence: Synthetic oligonucleotide
  misc_feature 1..21: note = Description of Combined DNA/RNA Molecule: Synthetic oligonucleotide
  source 1..21: mol_type = other RNA
ccataaggcatttcttgagtt

SEQ ID NO: 1374 - RNA, 21 nt, synthetic construct
  modified_base 20..21: mod_base = OTHER; note = thymine
  misc_feature 1..21: note = Description of Artificial Sequence: Synthetic oligonucleotide
  misc_feature 1..21: note = Description of Combined DNA/RNA Molecule: Synthetic oligonucleotide
  source 1..21: mol_type = other RNA
atgcattccataaggcatttt

SEQ ID NO: 1375 - RNA, 21 nt, synthetic construct
  modified_base 20..21: mod_base = OTHER; note = thymine
  misc_feature 1..21: note = Description of Artificial Sequence: Synthetic oligonucleotide
  misc_feature 1..21: note = Description of Combined DNA/RNA Molecule: Synthetic oligonucleotide
  source 1..21: mol_type = other RNA
tggtgctggttaacaccattt

SEQ ID NO: 1376 - RNA, 21 nt, synthetic construct
  modified_base 20..21: mod_base = OTHER; note = thymine
  misc_feature 1..21: note = Description of Artificial Sequence: Synthetic oligonucleotide
  misc_feature 1..21: note = Description of Combined DNA/RNA Molecule: Synthetic oligonucleotide
  source 1..21: mol_type = other RNA
atctgttcagccctgaaaatt

SEQ ID NO: 1377 - RNA, 21 nt, synthetic construct
  modified_base 20..21: mod_base = OTHER; note = thymine
  misc_feature 1..21: note = Description of Artificial Sequence: Synthetic oligonucleotide
  misc_feature 1..21: note = Description of Combined DNA/RNA Molecule: Synthetic oligonucleotide
  source 1..21: mol_type = other RNA
agatgatgctggtggtccatt

SEQ ID NO: 1378 - RNA, 21 nt, synthetic construct
  modified_base 20..21: mod_base = OTHER; note = thymine
  misc_feature 1..21: note = Description of Artificial Sequence: Synthetic oligonucleotide
  misc_feature 1..21: note = Description of Combined DNA/RNA Molecule: Synthetic oligonucleotide
  source 1..21: mol_type = other RNA
atatggagccaagctccagtt

SEQ ID NO: 1379 - RNA, 21 nt, synthetic construct
  modified_base 20..21: mod_base = OTHER; note = thymine
  misc_feature 1..21: note = Description of Artificial Sequence: Synthetic oligonucleotide
  misc_feature 1..21: note = Description of Combined DNA/RNA Molecule: Synthetic oligonucleotide
  source 1..21: mol_type = other RNA
ccgaatcaccgatgtcatttt

SEQ ID NO: 1380 - RNA, 21 nt, synthetic construct
  modified_base 20..21: mod_base = OTHER; note = thymine
  misc_feature 1..21: note = Description of Artificial Sequence: Synthetic oligonucleotide
  misc_feature 1..21: note = Description of Combined DNA/RNA Molecule: Synthetic oligonucleotide
  source 1..21: mol_type = other RNA
gcagagcaatccagagcggtt

SEQ ID NO: 1381 - RNA, 21 nt, synthetic construct
  modified_base 20..21: mod_base = OTHER; note = thymine
  misc_feature 1..21: note = Description of Artificial Sequence: Synthetic oligonucleotide
  misc_feature 1..21: note = Description of Combined DNA/RNA Molecule: Synthetic oligonucleotide
  source 1..21: mol_type = other RNA
acaccatttacttcaagggtt

SEQ ID NO: 1382 - RNA, 21 nt, synthetic construct
  modified_base 20..21: mod_base = OTHER; note = thymine
  misc_feature 1..21: note = Description of Artificial Sequence: Synthetic oligonucleotide
  misc_feature 1..21: note = Description of Combined DNA/RNA Molecule: Synthetic oligonucleotide
  source 1..21: mol_type = other RNA
gtaccaggaaggcaagttctt

SEQ ID NO: 1383 - RNA, 21 nt, synthetic construct
  modified_base 20..21: mod_base = OTHER; note = thymine
  misc_feature 1..21: note = Description of Artificial Sequence: Synthetic oligonucleotide
  misc_feature 1..21: note = Description of Combined DNA/RNA Molecule: Synthetic oligonucleotide
  source 1..21: mol_type = other RNA
tgcccaagcctgagaagagtt

SEQ ID NO: 1384 - RNA, 21 nt, synthetic construct
  modified_base 20..21: mod_base = OTHER; note = thymine
  misc_feature 1..21: note = Description of Artificial Sequence: Synthetic oligonucleotide
  misc_feature 1..21: note = Description of Combined DNA/RNA Molecule: Synthetic oligonucleotide
  source 1..21: mol_type = other RNA
ttctttgccaaactgaacttt

SEQ ID NO: 1385 - RNA, 21 nt, synthetic construct
  modified_base 20..21: mod_base = OTHER; note = thymine
  misc_feature 1..21: note = Description of Artificial Sequence: Synthetic oligonucleotide
  misc_feature 1..21: note = Description of Combined DNA/RNA Molecule: Synthetic oligonucleotide
  source 1..21: mol_type = other RNA
tggccaaggtagagaaggatt

SEQ ID NO: 1386 - RNA, 21 nt, synthetic construct
  modified_base 20..21: mod_base = OTHER; note = thymine
  misc_feature 1..21: note = Description of Artificial Sequence: Synthetic oligonucleotide
  misc_feature 1..21: note = Description of Combined DNA/RNA Molecule: Synthetic oligonucleotide
  source 1..21: mol_type = other RNA
tgctgcaagagtggctggatt

SEQ ID NO: 1387 - RNA, 21 nt, synthetic construct
  modified_base 20..21: mod_base = OTHER; note = thymine
  misc_feature 1..21: note = Description of Artificial Sequence: Synthetic oligonucleotide
  misc_feature 1..21: note = Description of Combined DNA/RNA Molecule: Synthetic oligonucleotide
  source 1..21: mol_type = other RNA
ccatgtgcatttaccgctctt

SEQ ID NO: 1388 - RNA, 21 nt, synthetic construct
  modified_base 20..21: mod_base = OTHER; note = thymine
  misc_feature 1..21: note = Description of Artificial Sequence: Synthetic oligonucleotide
  misc_feature 1..21: note = Description of Combined DNA/RNA Molecule: Synthetic oligonucleotide
  source 1..21: mol_type = other RNA
agacatgggccttgtcgattt

SEQ ID NO: 1389 - RNA, 21 nt, synthetic construct
  modified_base 20..21: mod_base = OTHER; note = thymine
  misc_feature 1..21: note = Description of Artificial Sequence: Synthetic oligonucleotide
  misc_feature 1..21: note = Description of Combined DNA/RNA Molecule: Synthetic oligonucleotide
  source 1..21: mol_type = other RNA
ttttggagacaaatccctttt

SEQ ID NO: 1390 - RNA, 21 nt, synthetic construct
  modified_base 20..21: mod_base = OTHER; note = thymine
  misc_feature 1..21: note = Description of Artificial Sequence: Synthetic oligonucleotide
  misc_feature 1..21: note = Description of Combined DNA/RNA Molecule: Synthetic oligonucleotide
  source 1..21: mol_type = other RNA
ggatgagggctcagaacagtt

SEQ ID NO: 1391 - RNA, 21 nt, synthetic construct
  modified_base 20..21: mod_base = OTHER; note = thymine
  misc_feature 1..21: note = Description of Artificial Sequence: Synthetic oligonucleotide
  misc_feature 1..21: note = Description of Combined DNA/RNA Molecule: Synthetic oligonucleotide
  source 1..21: mol_type = other RNA
cggcttttgctatgaccaatt

SEQ ID NO: 1392 - RNA, 21 nt, synthetic construct
  modified_base 20..21: mod_base = OTHER; note = thymine
  misc_feature 1..21: note = Description of Artificial Sequence: Synthetic oligonucleotide
  misc_feature 1..21: note = Description of Combined DNA/RNA Molecule: Synthetic oligonucleotide
  source 1..21: mol_type = other RNA
agctccagcccctggactttt

SEQ ID NO: 1393 - RNA, 21 nt, synthetic construct
  modified_base 20..21: mod_base = OTHER; note = thymine
  misc_feature 1..21: note = Description of Artificial Sequence: Synthetic oligonucleotide
  misc_feature 1..21: note = Description of Combined DNA/RNA Molecule: Synthetic oligonucleotide
  source 1..21: mol_type = other RNA
ctgatcagatccacttctttt

SEQ ID NO: 1394 - RNA, 21 nt, synthetic construct
  modified_base 20..21: mod_base = OTHER; note = thymine
  misc_feature 1..21: note = Description of Artificial Sequence: Synthetic oligonucleotide
  misc_feature 1..21: note = Description of Combined DNA/RNA Molecule: Synthetic oligonucleotide
  source 1..21: mol_type = other RNA
tgctggtggtccacatgcctt

SEQ ID NO: 1395 - RNA, 21 nt, synthetic construct
  modified_base 20..21: mod_base = OTHER; note = thymine
  misc_feature 1..21: note = Description of Artificial Sequence: Synthetic oligonucleotide
  misc_feature 1..21: note = Description of Combined DNA/RNA Molecule: Synthetic oligonucleotide
  source 1..21: mol_type = other RNA
gcgagatttagaggaaagatt

SEQ ID NO: 1396 - RNA, 21 nt, synthetic construct
  modified_base 20..21: mod_base = OTHER; note = thymine
  misc_feature 1..21: note = Description of Artificial Sequence: Synthetic oligonucleotide
  misc_feature 1..21: note = Description of Combined DNA/RNA Molecule: Synthetic oligonucleotide
  source 1..21: mol_type = other RNA
ctgctcattggcttctgggtt

SEQ ID NO: 1397 - RNA, 21 nt, synthetic construct
  modified_base 20..21: mod_base = OTHER; note = thymine
  misc_feature 1..21: note = Description of Artificial Sequence: Synthetic oligonucleotide
  misc_feature 1..21: note = Description of Combined DNA/RNA Molecule: Synthetic oligonucleotide
  source 1..21: mol_type = other RNA
ccttcaatgagacctaccatt

SEQ ID NO: 1398 - RNA, 21 nt, synthetic construct
  modified_base 20..21: mod_base = OTHER; note = thymine
  misc_feature 1..21: note = Description of Artificial Sequence: Synthetic oligonucleotide
  misc_feature 1..21: note = Description of Combined DNA/RNA Molecule: Synthetic oligonucleotide
  source 1..21: mol_type = other RNA
accatttacttcaagggcctt

SEQ ID NO: 1399 - RNA, 21 nt, synthetic construct
  modified_base 20..21: mod_base = OTHER; note = thymine
  misc_feature 1..21: note = Description of Artificial Sequence: Synthetic oligonucleotide
  misc_feature 1..21: note = Description of Combined DNA/RNA Molecule: Synthetic oligonucleotide
  source 1..21: mol_type = other RNA
gcacctcttcctatttttgtt

SEQ ID NO: 1400 - RNA, 21 nt, synthetic construct
  modified_base 20..21: mod_base = OTHER; note = thymine
  misc_feature 1..21: note = Description of Artificial Sequence: Synthetic oligonucleotide
  misc_feature 1..21: note = Description of Combined DNA/RNA Molecule: Synthetic oligonucleotide
  source 1..21: mol_type = other RNA
gtggctgaaggcacccaggtt

SEQ ID NO: 1401 - RNA, 21 nt, synthetic construct
  modified_base 20..21: mod_base = OTHER; note = thymine
  misc_feature 1..21: note = Description of Artificial Sequence: Synthetic oligonucleotide
  misc_feature 1..21: note = Description of Combined DNA/RNA Molecule: Synthetic oligonucleotide
  source 1..21: mol_type = other RNA
tccgcattgaggacggctttt

SEQ ID NO: 1402 - RNA, 21 nt, synthetic construct
  modified_base 20..21: mod_base = OTHER; note = thymine
  misc_feature 1..21: note = Description of Artificial Sequence: Synthetic oligonucleotide
  misc_feature 1..21: note = Description of Combined DNA/RNA Molecule: Synthetic oligonucleotide
  source 1..21: mol_type = other RNA
tggacatctgcacagccaatt

SEQ ID NO: 1403 - RNA, 21 nt, synthetic construct
  modified_base 20..21: mod_base = OTHER; note = thymine
  misc_feature 1..21: note = Description of Artificial Sequence: Synthetic oligonucleotide
  misc_feature 1..21: note = Description of Combined DNA/RNA Molecule: Synthetic oligonucleotide
  source 1..21: mol_type = other RNA
gtccaaactcccaggtatttt

SEQ ID NO: 1404 - RNA, 21 nt, synthetic construct
  modified_base 20..21: mod_base = OTHER; note = thymine
  misc_feature 1..21: note = Description of Artificial Sequence: Synthetic oligonucleotide
  misc_feature 1..21: note = Description of Combined DNA/RNA Molecule: Synthetic oligonucleotide
  source 1..21: mol_type = other RNA
agaaggaactcaccccagatt

SEQ ID NO: 1405 - RNA, 21 nt, synthetic construct
  modified_base 20..21: mod_base = OTHER; note = thymine
  misc_feature 1..21: note = Description of Artificial Sequence: Synthetic oligonucleotide
  misc_feature 1..21: note = Description of Combined DNA/RNA Molecule: Synthetic oligonucleotide
  source 1..21: mol_type = other RNA
tcttgaggtaaatgaagaatt

SEQ ID NO: 1406 - RNA, 21 nt, synthetic construct
  modified_base 20..21: mod_base = OTHER; note = thymine
  misc_feature 1..21: note = Description of Artificial Sequence: Synthetic oligonucleotide
  misc_feature 1..21: note = Description of Combined DNA/RNA Molecule: Synthetic oligonucleotide
  source 1..21: mol_type = other RNA
agccctgtggacatctgcatt

SEQ ID NO: 1407 - RNA, 21 nt, synthetic construct
  modified_base 20..21: mod_base = OTHER; note = thymine
  misc_feature 1..21: note = Description of Artificial Sequence: Synthetic oligonucleotide
  misc_feature 1..21: note = Description of Combined DNA/RNA Molecule: Synthetic oligonucleotide
  source 1..21: mol_type = other RNA
cagagcggccatcaacaaatt

SEQ ID NO: 1408 - RNA, 21 nt, synthetic construct
  modified_base 20..21: mod_base = OTHER; note = thymine
  misc_feature 1..21: note = Description of Artificial Sequence: Synthetic oligonucleotide
  misc_feature 1..21: note = Description of Combined DNA/RNA Molecule: Synthetic oligonucleotide
  source 1..21: mol_type = other RNA
atttaagtttgacaccatatt

SEQ ID NO: 1409 - RNA, 21 nt, synthetic construct
  modified_base 20..21: mod_base = OTHER; note = thymine
  misc_feature 1..21: note = Description of Artificial Sequence: Synthetic oligonucleotide
  misc_feature 1..21: note = Description of Combined DNA/RNA Molecule: Synthetic oligonucleotide
  source 1..21: mol_type = other RNA
tgagaagagcctggccaagtt

SEQ ID NO: 1410 - RNA, 21 nt, synthetic construct
  modified_base 20..21: mod_base = OTHER; note = thymine
  misc_feature 1..21: note = Description of Artificial Sequence: Synthetic oligonucleotide
  misc_feature 1..21: note = Description of Combined DNA/RNA Molecule: Synthetic oligonucleotide
  source 1..21: mol_type = other RNA
tcaccatggtcctcatctttt

SEQ ID NO: 1411 - RNA, 21 nt, synthetic construct
  modified_base 20..21: mod_base = OTHER; note = thymine
  misc_feature 1..21: note = Description of Artificial Sequence: Synthetic oligonucleotide
  misc_feature 1..21: note = Description of Combined DNA/RNA Molecule: Synthetic oligonucleotide
  source 1..21: mol_type = other RNA
ggaaggaactgttctacaatt

SEQ ID NO: 1412 - RNA, 21 nt, synthetic construct
  modified_base 20..21: mod_base = OTHER; note = thymine
  misc_feature 1..21: note = Description of Artificial Sequence: Synthetic oligonucleotide
  misc_feature 1..21: note = Description of Combined DNA/RNA Molecule: Synthetic oligonucleotide
  source 1..21: mol_type = other RNA
ctggtttttataagagaagtt

SEQ ID NO: 1413 - RNA, 21 nt, synthetic construct
  modified_base 20..21: mod_base = OTHER; note = thymine
  misc_feature 1..21: note = Description of Artificial Sequence: Synthetic oligonucleotide
  misc_feature 1..21: note = Description of Combined DNA/RNA Molecule: Synthetic oligonucleotide
  source 1..21: mol_type = other RNA
ctgggtgcctgtaatgacatt

SEQ ID NO: 1414 - RNA, 21 nt, synthetic construct
  modified_base 20..21: mod_base = OTHER; note = thymine
  misc_feature 1..21: note = Description of Artificial Sequence: Synthetic oligonucleotide
  misc_feature 1..21: note = Description of Combined DNA/RNA Molecule: Synthetic oligonucleotide
  source 1..21: mol_type = other RNA
gtaccgctgttgtgattgctt

SEQ ID NO: 1415 - RNA, 21 nt, synthetic construct
  modified_base 20..21: mod_base = OTHER; note = thymine
  misc_feature 1..21: note = Description of Artificial Sequence: Synthetic oligonucleotide
  misc_feature 1..21: note = Description of Combined DNA/RNA Molecule: Synthetic oligonucleotide
  source 1..21: mol_type = other RNA
tctatcagcacctggcagatt

SEQ ID NO: 1416 - RNA, 21 nt, synthetic construct
  modified_base 20..21: mod_base = OTHER; note = thymine
  misc_feature 1..21: note = Description of Artificial Sequence: Synthetic oligonucleotide
  misc_feature 1..21: note = Description of Combined DNA/RNA Molecule: Synthetic oligonucleotide
  source 1..21: mol_type = other RNA
ctggcagattccaagaatgtt

SEQ ID NO: 1417 - RNA, 21 nt, synthetic construct
  modified_base 20..21: mod_base = OTHER; note = thymine
  misc_feature 1..21: note = Description of Artificial Sequence: Synthetic oligonucleotide
  misc_feature 1..21: note = Description of Combined DNA/RNA Molecule: Synthetic oligonucleotide
  source 1..21: mol_type = other RNA
cgatgtcattccctcggaatt

SEQ ID NO: 1418 - RNA, 21 nt, synthetic construct
  modified_base 20..21: mod_base = OTHER; note = thymine
  misc_feature 1..21: note = Description of Artificial Sequence: Synthetic oligonucleotide
  misc_feature 1..21: note = Description of Combined DNA/RNA Molecule: Synthetic oligonucleotide
  source 1..21: mol_type = other RNA
gcttctgggactgcgtgactt

SEQ ID NO: 1419 - RNA, 21 nt, synthetic construct
  modified_base 20..21: mod_base = OTHER; note = thymine
  misc_feature 1..21: note = Description of Artificial Sequence: Synthetic oligonucleotide
  misc_feature 1..21: note = Description of Combined DNA/RNA Molecule: Synthetic oligonucleotide
  source 1..21: mol_type = other RNA
cctgtcacgggagccctgttt

SEQ ID NO: 1420 - RNA, 21 nt, synthetic construct
  modified_base 20..21: mod_base = OTHER; note = thymine
  misc_feature 1..21: note = Description of Artificial Sequence: Synthetic oligonucleotide
  misc_feature 1..21: note = Description of Combined DNA/RNA Molecule: Synthetic oligonucleotide
  source 1..21: mol_type = other RNA
atttacttcaagggcctgttt

SEQ ID NO: 1421 - RNA, 21 nt, synthetic construct
  modified_base 20..21: mod_base = OTHER; note = thymine
  misc_feature 1..21: note = Description of Artificial Sequence: Synthetic oligonucleotide
  misc_feature 1..21: note = Description of Combined DNA/RNA Molecule: Synthetic oligonucleotide
  source 1..21: mol_type = other RNA
tgctaccactttctatcagtt

SEQ ID NO: 1422 - RNA, 21 nt, synthetic construct
  modified_base 20..21: mod_base = OTHER; note = thymine
  misc_feature 1..21: note = Description of Artificial Sequence: Synthetic oligonucleotide
  misc_feature 1..21: note = Description of Combined DNA/RNA Molecule: Synthetic oligonucleotide
  source 1..21: mol_type = other RNA
ggaactgtccaaggccaattt

SEQ ID NO: 1423 - RNA, 21 nt, synthetic construct
  modified_base 20..21: mod_base = OTHER; note = thymine
  misc_feature 1..21: note = Description of Artificial Sequence: Synthetic oligonucleotide
  misc_feature 1..21: note = Description of Combined DNA/RNA Molecule: Synthetic oligonucleotide
  source 1..21: mol_type = other RNA
acaaatcctccaagttagttt

SEQ ID NO: 1424 - RNA, 21 nt, synthetic construct
  modified_base 20..21: mod_base = OTHER; note = thymine
  misc_feature 1..21: note = Description of Artificial Sequence: Synthetic oligonucleotide
  misc_feature 1..21: note = Description of Combined DNA/RNA Molecule: Synthetic oligonucleotide
  source 1..21: mol_type = other RNA
atttaccgctccccggagatt

SEQ ID NO: 1425 - RNA, 21 nt, synthetic construct
  modified_base 20..21: mod_base = OTHER; note = thymine
  misc_feature 1..21: note = Description of Artificial Sequence: Synthetic oligonucleotide
  misc_feature 1..21: note = Description of Combined DNA/RNA Molecule: Synthetic oligonucleotide
  source 1..21: mol_type = other RNA
acccctgagtatctccacgtt

SEQ ID NO: 1426 - RNA, 21 nt, synthetic construct
  modified_base 20..21: mod_base = OTHER; note = thymine
  misc_feature 1..21: note = Description of Artificial Sequence: Synthetic oligonucleotide
  misc_feature 1..21: note = Description of Combined DNA/RNA Molecule: Synthetic oligonucleotide
  source 1..21: mol_type = other RNA
cactatctccacttgcccatt

SEQ ID NO: 1427 - RNA, 21 nt, synthetic construct
  modified_base 20..21: mod_base = OTHER; note = thymine
  misc_feature 1..21: note = Description of Artificial Sequence: Synthetic oligonucleotide
  misc_feature 1..21: note = Description of Combined DNA/RNA Molecule: Synthetic oligonucleotide
  source 1..21: mol_type = other RNA
aaatacaaactacttccattt

SEQ ID NO: 1428 - RNA, 21 nt, synthetic construct
  modified_base 20..21: mod_base = OTHER; note = thymine
  misc_feature 1..21: note = Description of Artificial Sequence: Synthetic oligonucleotide
  misc_feature 1..21: note = Description of Combined DNA/RNA Molecule: Synthetic oligonucleotide
  source 1..21: mol_type = other RNA
ctggttaacaccatttacttt

SEQ ID NO: 1429 - RNA, 21 nt, synthetic construct
  modified_base 20..21: mod_base = OTHER; note = thymine
  misc_feature 1..21: note = Description of Artificial Sequence: Synthetic oligonucleotide
  misc_feature 1..21: note = Description of Combined DNA/RNA Molecule: Synthetic oligonucleotide
  source 1..21: mol_type = other RNA
tcatcttgcccaagcctgatt

SEQ ID NO: 1430 - RNA, 21 nt, synthetic construct
  modified_base 20..21: mod_base = OTHER; note = thymine
  misc_feature 1..21: note = Description of Artificial Sequence: Synthetic oligonucleotide
  misc_feature 1..21: note = Description of Combined DNA/RNA Molecule: Synthetic oligonucleotide
  source 1..21: mol_type = other RNA
cctcagatcacactatctctt

SEQ ID NO: 1431 - RNA, 21 nt, synthetic construct
  modified_base 20..21: mod_base = OTHER; note = thymine
  misc_feature 1..21: note = Description of Artificial Sequence: Synthetic oligonucleotide
  misc_feature 1..21: note = Description of Combined DNA/RNA Molecule: Synthetic oligonucleotide
  source 1..21: mol_type = other RNA
ctgtcctctggaacctctgtt

SEQ ID NO: 1432 - RNA, 21 nt, synthetic construct
  modified_base 20..21: mod_base = OTHER; note = thymine
  misc_feature 1..21: note = Description of Artificial Sequence: Synthetic oligonucleotide
  misc_feature 1..21: note = Description of Combined DNA/RNA Molecule: Synthetic oligonucleotide
  source 1..21: mol_type = other RNA
ccctgtggaagattagcggtt

SEQ ID NO: 1433 - RNA, 21 nt, synthetic construct
  modified_base 20..21: mod_base = OTHER; note = thymine
  misc_feature 1..21: note = Description of Artificial Sequence: Synthetic oligonucleotide
  misc_feature 1..21: note = Description of Combined DNA/RNA Molecule: Synthetic oligonucleotide
  source 1..21: mol_type = other RNA
atctccacggcttttgctatt

SEQ ID NO: 1434 - RNA, 21 nt, synthetic construct
  modified_base 20..21: mod_base = OTHER; note = thymine
  misc_feature 1..21: note = Description of Artificial Sequence: Synthetic oligonucleotide
  misc_feature 1..21: note = Description of Combined DNA/RNA Molecule: Synthetic oligonucleotide
  source 1..21: mol_type = other RNA
gtggctggatgaattggagtt

SEQ ID NO: 1435 - RNA, 21 nt, synthetic construct
  modified_base 20..21: mod_base = OTHER; note = thymine
  misc_feature 1..21: note = Description of Artificial Sequence: Synthetic oligonucleotide
  misc_feature 1..21: note = Description of Combined DNA/RNA Molecule: Synthetic oligonucleotide
  source 1..21: mol_type = other RNA
caagttagtatcagccaattt

SEQ ID NO: 1436 - RNA, 21 nt, synthetic construct
  modified_base 20..21: mod_base = OTHER; note = thymine
  misc_feature 1..21: note = Description of Artificial Sequence: Synthetic oligonucleotide
  misc_feature 1..21: note = Description of Combined DNA/RNA Molecule: Synthetic oligonucleotide
  source 1..21: mol_type = other RNA
gtgatgacatcaccatggttt

SEQ ID NO: 1437 - RNA, 21 nt, synthetic construct
  modified_base 20..21: mod_base = OTHER; note = thymine
  misc_feature 1..21: note = Description of Artificial Sequence: Synthetic oligonucleotide
  misc_feature 1..21: note = Description of Combined DNA/RNA Molecule: Synthetic oligonucleotide
  source 1..21: mol_type = other RNA
ttccaagaatgacaatgattt

SEQ ID NO: 1438 - RNA, 21 nt, synthetic construct
  modified_base 20..21: mod_base = OTHER; note = thymine
  misc_feature 1..21: note = Description of Artificial Sequence: Synthetic oligonucleotide
  misc_feature 1..21: note = Description of Combined DNA/RNA Molecule: Synthetic oligonucleotide
  source 1..21: mol_type = other RNA
tgatggaggtatttaagtttt

SEQ ID NO: 1439 - RNA, 21 nt, synthetic construct
  modified_base 20..21: mod_base = OTHER; note = thymine
  misc_feature 1..21: note = Description of Artificial Sequence: Synthetic oligonucleotide
  misc_feature 1..21: note = Description of Combined DNA/RNA Molecule: Synthetic oligonucleotide
  source 1..21: mol_type = other RNA
gtattccaatgtgataggatt

SEQ ID NO: 1440 - RNA, 21 nt, synthetic construct
  modified_base 20..21: mod_base = OTHER; note = thymine
  misc_feature 1..21: note = Description of Artificial Sequence: Synthetic oligonucleotide
  misc_feature 1..21: note = Description of Combined DNA/RNA Molecule: Synthetic oligonucleotide
  source 1..21: mol_type = other RNA
cagccaagccgcgggacattt

SEQ ID NO: 1441 - RNA, 21 nt, synthetic construct
  modified_base 20..21: mod_base = OTHER; note = thymine
  misc_feature 1..21: note = Description of Artificial Sequence: Synthetic oligonucleotide
  misc_feature 1..21: note = Description of Combined DNA/RNA Molecule: Synthetic oligonucleotide
  source 1..21: mol_type = other RNA
catgccccgcttccgcatttt

SEQ ID NO: 1442 - RNA, 21 nt, synthetic construct
  modified_base 20..21: mod_base = OTHER; note = thymine
  misc_feature 1..21: note = Description of Artificial Sequence: Synthetic oligonucleotide
  misc_feature 1..21: note = Description of Combined DNA/RNA Molecule: Synthetic oligonucleotide
  source 1..21: mol_type = other RNA
atgtgataggaactgtaactt

SEQ ID NO: 1443 - RNA, 21 nt, synthetic construct
  modified_base 20..21: mod_base = OTHER; note = thymine
  misc_feature 1..21: note = Description of Artificial Sequence: Synthetic oligonucleotide
  misc_feature 1..21: note = Description of Combined DNA/RNA Molecule: Synthetic oligonucleotide
  source 1..21: mol_type = other RNA
acaaatcccttaccttcaatt

SEQ ID NO: 1444 - RNA, 21 nt, synthetic construct
  modified_base 20..21: mod_base = OTHER; note = thymine
  misc_feature 1..21: note = Description of Artificial Sequence: Synthetic oligonucleotide
  misc_feature 1..21: note = Description of Combined DNA/RNA Molecule: Synthetic oligonucleotide
  source 1..21: mol_type = other RNA
aggtttatcttttgtcctttt

SEQ ID NO: 1445 - RNA, 21 nt, synthetic construct
  modified_base 20..21: mod_base = OTHER; note = thymine
  misc_feature 1..21: note = Description of Artificial Sequence: Synthetic oligonucleotide
  misc_feature 1..21: note = Description of Combined DNA/RNA Molecule: Synthetic oligonucleotide
  source 1..21: mol_type = other RNA
agatcccggaggccaccaatt

SEQ ID NO: 1446 - RNA, 21 nt, synthetic construct
  modified_base 20..21: mod_base = OTHER; note = thymine
  misc_feature 1..21: note = Description of Artificial Sequence: Synthetic oligonucleotide
  misc_feature 1..21: note = Description of Combined DNA/RNA Molecule: Synthetic oligonucleotide
  source 1..21: mol_type = other RNA
acattttcctgtcaccccttt

SEQ ID NO: 1447 - RNA, 21 nt, synthetic construct
  modified_base 20..21: mod_base = OTHER; note = thymine
  misc_feature 1..21: note = Description of Artificial Sequence: Synthetic oligonucleotide
  misc_feature 1..21: note = Description of Combined DNA/RNA Molecule: Synthetic oligonucleotide
  source 1..21: mol_type = other RNA
ggcctttcctggtttttattt

SEQ ID NO: 1448 - RNA, 21 nt, synthetic construct
  modified_base 20..21: mod_base = OTHER; note = thymine
  misc_feature 1..21: note = Description of Artificial Sequence: Synthetic oligonucleotide
  misc_feature 1..21: note = Description of Combined DNA/RNA Molecule: Synthetic oligonucleotide
  source 1..21: mol_type = other RNA
ttgtgttaagtaaaatgtttt

SEQ ID NO: 1449 - RNA, 21 nt, synthetic construct
  modified_base 20..21: mod_base = OTHER; note = thymine
  misc_feature 1..21: note = Description of Artificial Sequence: Synthetic oligonucleotide
  misc_feature 1..21: note = Description of Combined DNA/RNA Molecule: Synthetic oligonucleotide
  source 1..21: mol_type = other RNA
caaggaaaatgcagagcaatt

SEQ ID NO: 1450 - RNA, 21 nt, synthetic construct
  modified_base 20..21: mod_base = OTHER; note = thymine
  misc_feature 1..21: note = Description of Artificial Sequence: Synthetic oligonucleotide
  misc_feature 1..21: note = Description of Combined DNA/RNA Molecule: Synthetic oligonucleotide
  source 1..21: mol_type = other RNA
ctgagaaaacatctgatcatt

SEQ ID NO: 1451 - RNA, 21 nt, synthetic construct
  modified_base 20..21: mod_base = OTHER; note = thymine
  misc_feature 1..21: note = Description of Artificial Sequence: Synthetic oligonucleotide
  misc_feature 1..21: note = Description of Combined DNA/RNA Molecule: Synthetic oligonucleotide
  source 1..21: mol_type = other RNA
ttacttcaagggcctgtggtt

SEQ ID NO: 1452 - RNA, 21 nt, synthetic construct
  modified_base 20..21: mod_base = OTHER; note = thymine
  misc_feature 1..21: note = Description of Artificial Sequence: Synthetic oligonucleotide
  misc_feature 1..21: note = Description of Combined DNA/RNA Molecule: Synthetic oligonucleotide
  source 1..21: mol_type = other RNA
accccaacagggtgacttttt

SEQ ID NO: 1453 - RNA, 21 nt, synthetic construct
  modified_base 20..21: mod_base = OTHER; note = thymine
  misc_feature 1..21: note = Description of Artificial Sequence: Synthetic oligonucleotide
  misc_feature 1..21: note = Description of Combined DNA/RNA Molecule: Synthetic oligonucleotide
  source 1..21: mol_type = other RNA
ccaggtattgttgcagaagtt

SEQ ID NO: 1454 - RNA, 21 nt, synthetic construct
  modified_base 20..21: mod_base = OTHER; note = thymine
  misc_feature 1..21: note = Description of Artificial Sequence: Synthetic oligonucleotide
  misc_feature 1..21: note = Description of Combined DNA/RNA Molecule: Synthetic oligonucleotide
  source 1..21: mol_type = other RNA
gcctgtggaagtcaaagtttt

SEQ ID NO: 1455 - RNA, 21 nt, synthetic construct
  modified_base 20..21: mod_base = OTHER; note = thymine
  misc_feature 1..21: note = Description of Artificial Sequence: Synthetic oligonucleotide
  misc_feature 1..21: note = Description of Combined DNA/RNA Molecule: Synthetic oligonucleotide
  source 1..21: mol_type = other RNA
tggaacctctgcgagattttt

SEQ ID NO: 1456 - RNA, 21 nt, synthetic construct
  modified_base 20..21: mod_base = OTHER; note = thymine
  misc_feature 1..21: note = Description of Artificial Sequence: Synthetic oligonucleotide
  misc_feature 1..21: note = Description of Combined DNA/RNA Molecule: Synthetic oligonucleotide
  source 1..21: mol_type = other RNA
agccctgagaacacaaggatt

SEQ ID NO: 1457 - RNA, 21 nt, synthetic construct
  modified_base 20..21: mod_base = OTHER; note = thymine
  misc_feature 1..21: note = Description of Artificial Sequence: Synthetic oligonucleotide
  misc_feature 1..21: note = Description of Combined DNA/RNA Molecule: Synthetic oligonucleotide
  source 1..21: mol_type = other RNA
ctctatgtctcagatgcattt

SEQ ID NO: 1458 - RNA, 21 nt, synthetic construct
  modified_base 20..21: mod_base = OTHER; note = thymine
  misc_feature 1..21: note = Description of Artificial Sequence: Synthetic oligonucleotide
  misc_feature 1..21: note = Description of Combined DNA/RNA Molecule: Synthetic oligonucleotide
  source 1..21: mol_type = other RNA
aagaccgaaggccgaatcatt

SEQ ID NO: 1459 - RNA, 21 nt, synthetic construct
  modified_base 20..21: mod_base = OTHER; note = thymine
  misc_feature 1..21: note = Description of Artificial Sequence: Synthetic oligonucleotide
  misc_feature 1..21: note = Description of Combined DNA/RNA Molecule: Synthetic oligonucleotide
  source 1..21: mol_type = other RNA
taaaatgttcttattcttttt

SEQ ID NO: 1460 - RNA, 21 nt, synthetic construct
  modified_base 20..21: mod_base = OTHER; note = thymine
  misc_feature 1..21: note = Description of Artificial Sequence: Synthetic oligonucleotide
  misc_feature 1..21: note = Description of Combined DNA/RNA Molecule: Synthetic oligonucleotide
  source 1..21: mol_type = other RNA
tctggaaaaaggaaggttttt

SEQ ID NO: 1461 - RNA, 21 nt, synthetic construct
  modified_base 20..21: mod_base = OTHER; note = thymine
  misc_feature 1..21: note = Description of Artificial Sequence: Synthetic oligonucleotide
  misc_feature 1..21: note = Description of Combined DNA/RNA Molecule: Synthetic oligonucleotide
  source 1..21: mol_type = other RNA
ttcaaggccaacaggcctttt

SEQ ID NO: 1462 - RNA, 21 nt, synthetic construct
  modified_base 20..21: mod_base = OTHER; note = thymine
  misc_feature 1..21: note = Description of Artificial Sequence: Synthetic oligonucleotide
  misc_feature 1..21: note = Description of Combined DNA/RNA Molecule: Synthetic oligonucleotide
  source 1..21: mol_type = other RNA
gaagtcaaagttcagcccttt

SEQ ID NO: 1463 - RNA, 21 nt, synthetic construct
  modified_base 20..21: mod_base = OTHER; note = thymine
  misc_feature 1..21: note = Description of Artificial Sequence: Synthetic oligonucleotide
  misc_feature 1..21: note = Description of Combined DNA/RNA Molecule: Synthetic oligonucleotide
  source 1..21: mol_type = other RNA
ccatcaatgagctcactgttt

SEQ ID NO: 1464 - RNA, 21 nt, synthetic construct
  modified_base 20..21: mod_base = OTHER; note = thymine
  misc_feature 1..21: note = Description of Artificial Sequence: Synthetic oligonucleotide
  misc_feature 1..21: note = Description of Combined DNA/RNA Molecule: Synthetic oligonucleotide
  source 1..21: mol_type = other RNA
ctctgaacactattatctttt

SEQ ID NO: 1465 - RNA, 21 nt, synthetic construct
  modified_base 20..21: mod_base = OTHER; note = thymine
  misc_feature 1..21: note = Description of Artificial Sequence: Synthetic oligonucleotide
  misc_feature 1..21: note = Description of Combined DNA/RNA Molecule: Synthetic oligonucleotide
  source 1..21: mol_type = other RNA
tgctggttaacaccatttatt

SEQ ID NO: 1466 - RNA, 21 nt, synthetic construct
  modified_base 20..21: mod_base = OTHER; note = thymine
  misc_feature 1..21: note = Description of Artificial Sequence: Synthetic oligonucleotide
  misc_feature 1..21: note = Description of Combined DNA/RNA Molecule: Synthetic oligonucleotide
  source 1..21: mol_type = other RNA
agaggaaagaaccagtttttt

SEQ ID NO: 1467 - RNA, 21 nt, synthetic construct
  modified_base 20..21: mod_base = OTHER; note = thymine
  misc_feature 1..21: note = Description of Artificial Sequence: Synthetic oligonucleotide
  misc_feature 1..21: note = Description of Combined DNA/RNA Molecule: Synthetic oligonucleotide
  source 1..21: mol_type = other RNA
tgcccagccctgtggaagatt

SEQ ID NO: 1468 - RNA, 21 nt, synthetic construct
  modified_base 20..21: mod_base = OTHER; note = thymine
  misc_feature 1..21: note = Description of Artificial Sequence: Synthetic oligonucleotide
  misc_feature 1..21: note = Description of Combined DNA/RNA Molecule: Synthetic oligonucleotide
  source 1..21: mol_type = other RNA
ctcagttgccttcttctcctt

SEQ ID NO: 1469 - RNA, 21 nt, synthetic construct
  modified_base 20..21: mod_base = OTHER; note = thymine
  misc_feature 1..21: note = Description of Artificial Sequence: Synthetic oligonucleotide
  misc_feature 1..21: note = Description of Combined DNA/RNA Molecule: Synthetic oligonucleotide
  source 1..21: mol_type = other RNA
caggcacccagcttggtcatt

SEQ ID NO: 1470 - RNA, 21 nt, synthetic construct
  modified_base 20..21: mod_base = OTHER; note = thymine
  misc_feature 1..21: note = Description of Artificial Sequence: Synthetic oligonucleotide
  misc_feature 1..21: note = Description of Combined DNA/RNA Molecule: Synthetic oligonucleotide
  source 1..21: mol_type = other RNA
gaagtaaatggtgttaacctt

SEQ ID NO: 1471 - RNA, 21 nt, synthetic construct
  modified_base 20..21: mod_base = OTHER; note = thymine
  misc_feature 1..21: note = Description of Artificial Sequence: Synthetic oligonucleotide
  misc_feature 1..21: note = Description of Combined DNA/RNA Molecule: Synthetic oligonucleotide
  source 1..21: mol_type = other RNA
gtaaatggtgttaaccagctt

SEQ ID NO: 1472 - RNA, 21 nt, synthetic construct
  modified_base 20..21: mod_base = OTHER; note = thymine
  misc_feature 1..21: note = Description of Artificial Sequence: Synthetic oligonucleotide
  misc_feature 1..21: note = Description of Combined DNA/RNA Molecule: Synthetic oligonucleotide
  source 1..21: mol_type = other RNA
ttgctggagggtgtcattatt

SEQ ID NO: 1473 - RNA, 21 nt, synthetic construct
  modified_base 20..21: mod_base = OTHER; note = thymine
  misc_feature 1..21: note = Description of Artificial Sequence: Synthetic oligonucleotide
  misc_feature 1..21: note = Description of Combined DNA/RNA Molecule: Synthetic oligonucleotide
  source 1..21: mol_type = other RNA
atcatagatgctgaacacgtt

SEQ ID NO: 1474 - RNA, 21 nt, synthetic construct
  modified_base 20..21: mod_base = OTHER; note = thymine
  misc_feature 1..21: note = Description of Artificial Sequence: Synthetic oligonucleotide
  misc_feature 1..21: note = Description of Combined DNA/RNA Molecule: Synthetic oligonucleotide
  source 1..21: mol_type = other RNA
aaactgaagccgtcctcaatt

SEQ ID NO: 1475 - RNA, 21 nt, synthetic construct
  modified_base 20..21: mod_base = OTHER; note = thymine
  misc_feature 1..21: note = Description of Artificial Sequence: Synthetic oligonucleotide
  misc_feature 1..21: note = Description of Combined DNA/RNA Molecule: Synthetic oligonucleotide
  source 1..21: mol_type = other RNA
acagttcccagacacgccgtt

SEQ ID NO: 1476 - RNA, 21 nt, synthetic construct
  modified_base 20..21: mod_base = OTHER; note = thymine
  misc_feature 1..21: note = Description of Artificial Sequence: Synthetic oligonucleotide
  misc_feature 1..21: note = Description of Combined DNA/RNA Molecule: Synthetic oligonucleotide
  source 1..21: mol_type = other RNA
ttgaagtaaatggtgttaatt

SEQ ID NO: 1477 - RNA, 21 nt, synthetic construct
  modified_base 20..21: mod_base = OTHER; note = thymine
  misc_feature 1..21: note = Description of Artificial Sequence: Synthetic oligonucleotide
  misc_feature 1..21: note = Description of Combined DNA/RNA Molecule: Synthetic oligonucleotide
  source 1..21: mol_type = other RNA
gagtttggacttttcagggtt

SEQ ID NO: 1478 - RNA, 21 nt, synthetic construct
  modified_base 20..21: mod_base = OTHER; note = thymine
  misc_feature 1..21: note = Description of Artificial Sequence: Synthetic oligonucleotide
  misc_feature 1..21: note = Description of Combined DNA/RNA Molecule: Synthetic oligonucleotide
  source 1..21: mol_type = other RNA
agacatagaggtcatctcgtt

SEQ ID NO: 1479 - RNA, 21 nt, synthetic construct
  modified_base 20..21: mod_base = OTHER; note = thymine
  misc_feature 1..21: note = Description of Artificial Sequence: Synthetic oligonucleotide
  misc_feature 1..21: note = Description of Combined DNA/RNA Molecule: Synthetic oligonucleotide
  source 1..21: mol_type = other RNA
tctccatcagccttgtagatt

SEQ ID NO: 1480 - RNA, 21 nt, synthetic construct
  modified_base 20..21: mod_base = OTHER; note = thymine
  misc_feature 1..21: note = Description of Artificial Sequence: Synthetic oligonucleotide
  misc_feature 1..21: note = Description of Combined DNA/RNA Molecule: Synthetic oligonucleotide
  source 1..21: mol_type = other RNA
agcaccagaacagtgagcttt

SEQ ID NO: 1481 - RNA, 21 nt, synthetic construct
  modified_base 20..21: mod_base = OTHER; note = thymine
  misc_feature 1..21: note = Description of Artificial Sequence: Synthetic oligonucleotide
  misc_feature 1..21: note = Description of Combined DNA/RNA Molecule: Synthetic oligonucleotide
  source 1..21: mol_type = other RNA
atgtcttgcagctgctccttt

SEQ ID NO: 1482 - RNA, 21 nt, synthetic construct
  modified_base 20..21: mod_base = OTHER; note = thymine
  misc_feature 1..21: note = Description of Artificial Sequence: Synthetic oligonucleotide
  misc_feature 1..21: note = Description of Combined DNA/RNA Molecule: Synthetic oligonucleotide
  source 1..21: mol_type = other RNA
agacacgccggttggtggctt

SEQ ID NO: 1483 - RNA, 21 nt, synthetic construct
  modified_base 20..21: mod_base = OTHER; note = thymine
  misc_feature 1..21: note = Description of Artificial Sequence: Synthetic oligonucleotide
  misc_feature 1..21: note = Description of Combined DNA/RNA Molecule: Synthetic oligonucleotide
  source 1..21: mol_type = other RNA
tccgggatcttctgttctgtt

SEQ ID NO: 1484 - RNA, 21 nt, synthetic construct
  modified_base 20..21: mod_base = OTHER; note = thymine
  misc_feature 1..21: note = Description of Artificial Sequence: Synthetic oligonucleotide
  misc_feature 1..21: note = Description of Combined DNA/RNA Molecule: Synthetic oligonucleotide
  source 1..21: mol_type = other RNA
gctgaacagatcgacaaggtt

SEQ ID NO: 1485 - RNA, 21 nt, synthetic construct
  modified_base 20..21: mod_base = OTHER; note = thymine
  misc_feature 1..21: note = Description of Artificial Sequence: Synthetic oligonucleotide
  misc_feature 1..21: note = Description of Combined DNA/RNA Molecule: Synthetic oligonucleotide
  source 1..21: mol_type = other RNA
ccgataacggaacttgccttt

SEQ ID NO: 1486 - RNA, 21 nt, synthetic construct
  modified_base 20..21: mod_base = OTHER; note = thymine
  misc_feature 1..21: note = Description of Artificial Sequence: Synthetic oligonucleotide
  misc_feature 1..21: note = Description of Combined DNA/RNA Molecule: Synthetic oligonucleotide
  source 1..21: mol_type = other RNA
atgagcagcaaggacaaaatt

SEQ ID NO: 1487 - RNA, 21 nt, synthetic construct
  modified_base 20..21: mod_base = OTHER; note = thymine
  misc_feature 1..21: note = Description of Artificial Sequence: Synthetic oligonucleotide
  misc_feature 1..21: note = Description of Combined DNA/RNA Molecule: Synthetic oligonucleotide
  source 1..21: mol_type = other RNA
ctgatgtcctggtaggtcttt

SEQ ID NO: 1488 - RNA, 21 nt, synthetic construct
  modified_base 20..21: mod_base = OTHER; note = thymine
  misc_feature 1..21: note = Description of Artificial Sequence: Synthetic oligonucleotide
  misc_feature 1..21: note = Description of Combined DNA/RNA Molecule: Synthetic oligonucleotide
  source 1..21: mol_type = other RNA
tagagtcggcagttcagtttt

SEQ ID NO: 1489 - RNA, 21 nt, synthetic construct
  modified_base 20..21: mod_base = OTHER; note = thymine
  misc_feature 1..21: note = Description of Artificial Sequence: Synthetic oligonucleotide
  misc_feature 1..21: note = Description of Combined DNA/RNA Molecule: Synthetic oligonucleotide
  source 1..21: mol_type = other RNA
caggcccttgaagtaaatgtt

SEQ ID NO: 1490 - RNA, 21 nt, synthetic construct
  modified_base 20..21: mod_base = OTHER; note = thymine
  misc_feature 1..21: note = Description of Artificial Sequence: Synthetic oligonucleotide
  misc_feature 1..21: note = Description of Combined DNA/RNA Molecule: Synthetic oligonucleotide
  source 1..21: mol_type = other RNA
ttttccttgaagtccagggtt

SEQ ID NO: 1491 - RNA, 21 nt, synthetic construct
  modified_base 20..21: mod_base = OTHER; note = thymine
  misc_feature 1..21: note = Description of Artificial Sequence: Synthetic oligonucleotide
  misc_feature 1..21: note = Description of Combined DNA/RNA Molecule: Synthetic oligonucleotide
  source 1..21: mol_type = other RNA
aacagcggtacttgcagcttt

SEQ ID NO: 1492 - RNA, 21 nt, synthetic construct
  modified_base 20..21: mod_base = OTHER; note = thymine
  misc_feature 1..21: note = Description of Artificial Sequence: Synthetic oligonucleotide
  misc_feature 1..21: note = Description of Combined DNA/RNA Molecule: Synthetic oligonucleotide
  source 1..21: mol_type = other RNA
aacagttccttccttgtgttt

SEQ ID NO: 1493 - RNA, 21 nt, synthetic construct
  modified_base 20..21: mod_base = OTHER; note = thymine
  misc_feature 1..21: note = Description of Artificial Sequence: Synthetic oligonucleotide
  misc_feature 1..21: note = Description of Combined DNA/RNA Molecule: Synthetic oligonucleotide
  source 1..21: mol_type = other RNA
agccctcatcctcagttgctt

SEQ ID NO: 1494 - RNA, 21 nt, synthetic construct
  modified_base 20..21: mod_base = OTHER; note = thymine
  misc_feature 1..21: note = Description of Artificial Sequence: Synthetic oligonucleotide
  misc_feature 1..21: note = Description of Combined DNA/RNA Molecule: Synthetic oligonucleotide
  source 1..21: mol_type = other RNA
taacacaagggttggctactt

SEQ ID NO: 1495 - RNA, 21 nt, synthetic construct
  modified_base 20..21: mod_base = OTHER; note = thymine
  misc_feature 1..21: note = Description of Artificial Sequence: Synthetic oligonucleotide
  misc_feature 1..21: note = Description of Combined DNA/RNA Molecule: Synthetic oligonucleotide
  source 1..21: mol_type = other RNA
tttacttctgttcacaaactt

SEQ ID NO: 1496 - RNA, 21 nt, synthetic construct
  modified_base 20..21: mod_base = OTHER; note = thymine
  misc_feature 1..21: note = Description of Artificial Sequence: Synthetic oligonucleotide
  misc_feature 1..21: note = Description of Combined DNA/RNA Molecule: Synthetic oligonucleotide
  source 1..21: mol_type = other RNA
ttggccttgaaagtcaccctt

SEQ ID NO: 1497 - RNA, 21 nt, synthetic construct
  modified_base 20..21: mod_base = OTHER; note = thymine
  misc_feature 1..21: note = Description of Artificial Sequence: Synthetic oligonucleotide
  misc_feature 1..21: note = Description of Combined DNA/RNA Molecule: Synthetic oligonucleotide
  source 1..21: mol_type = other RNA
ttcagccacgcgccgataatt

SEQ ID NO: 1498 - RNA, 21 nt, synthetic construct
  modified_base 20..21: mod_base = OTHER; note = thymine
  misc_feature 1..21: note = Description of Artificial Sequence: Synthetic oligonucleotide
  misc_feature 1..21: note = Description of Combined DNA/RNA Molecule: Synthetic oligonucleotide
  source 1..21: mol_type = other RNA
tttggcaaagaagaagtggtt

SEQ ID NO: 1499 - RNA, 21 nt, synthetic construct
  modified_base 20..21: mod_base = OTHER; note = thymine
  misc_feature 1..21: note = Description of Artificial Sequence: Synthetic oligonucleotide
  misc_feature 1..21: note = Description of Combined DNA/RNA Molecule: Synthetic oligonucleotide
  source 1..21: mol_type = other RNA
ccttgaagtaaatggtgtttt

SEQ ID NO: 1500 - RNA, 21 nt, synthetic construct
  modified_base 20..21: mod_base = OTHER; note = thymine
  misc_feature 1..21: note = Description of Artificial Sequence: Synthetic oligonucleotide
  misc_feature 1..21: note = Description of Combined DNA/RNA Molecule: Synthetic oligonucleotide
  source 1..21: mol_type = other RNA
ctgaacacgactctccatctt

SEQ ID NO: 1501 - RNA, 21 nt, synthetic construct
  modified_base 20..21: mod_base = OTHER; note = thymine
  misc_feature 1..21: note = Description of Artificial Sequence: Synthetic oligonucleotide
  misc_feature 1..21: note = Description of Combined DNA/RNA Molecule: Synthetic oligonucleotide
  source 1..21: mol_type = other RNA
gcccttgaagtaaatggtgtt

SEQ ID NO: 1502 - RNA, 21 nt, synthetic construct
  modified_base 20..21: mod_base = OTHER; note = thymine
  misc_feature 1..21: note = Description of Artificial Sequence: Synthetic oligonucleotide
  misc_feature 1..21: note = Description of Combined DNA/RNA Molecule: Synthetic oligonucleotide
  source 1..21: mol_type = other RNA
cacaggcccttgaagtaaatt

SEQ ID NO: 1503 - RNA, 21 nt, synthetic construct
  modified_base 20..21: mod_base = OTHER; note = thymine
  misc_feature 1..21: note = Description of Artificial Sequence: Synthetic oligonucleotide
  misc_feature 1..21: note = Description of Combined DNA/RNA Molecule: Synthetic oligonucleotide
  source 1..21: mol_type = other RNA
ttcagaggaacttctcttatt

SEQ ID NO: 1504 - RNA, 21 nt, synthetic construct
  modified_base 20..21: mod_base = OTHER; note = thymine
  misc_feature 1..21: note = Description of Artificial Sequence: Synthetic oligonucleotide
  misc_feature 1..21: note = Description of Combined DNA/RNA Molecule: Synthetic oligonucleotide
  source 1..21: mol_type = other RNA
attcatgggaatgtcccgctt

SEQ ID NO: 1505 - RNA, 21 nt, synthetic construct
  modified_base 20..21: mod_base = OTHER; note = thymine
  misc_feature 1..21: note = Description of Artificial Sequence: Synthetic oligonucleotide
  misc_feature 1..21: note = Description of Combined DNA/RNA Molecule: Synthetic oligonucleotide
  source 1..21: mol_type = other RNA
cagaggacagggtggggcatt

SEQ ID NO: 1506 - RNA, 21 nt, synthetic construct
  modified_base 20..21: mod_base = OTHER; note = thymine
  misc_feature 1..21: note = Description of Artificial Sequence: Synthetic oligonucleotide
  misc_feature 1..21: note = Description of Combined DNA/RNA Molecule: Synthetic oligonucleotide
  source 1..21: mol_type = other RNA
aagtaaatggtgttaaccatt

SEQ ID NO: 1507 - RNA, 21 nt, synthetic construct
  modified_base 20..21: mod_base = OTHER; note = thymine
  misc_feature 1..21: note = Description of Artificial Sequence: Synthetic oligonucleotide
  misc_feature 1..21: note = Description of Combined DNA/RNA Molecule: Synthetic oligonucleotide
  source 1..21: mol_type = other RNA
tgtgatctgaggcaatccgtt

SEQ ID NO: 1508 - RNA, 21 nt, synthetic construct
  modified_base 20..21: mod_base = OTHER; note = thymine
  misc_feature 1..21: note = Description of Artificial Sequence: Synthetic oligonucleotide
  misc_feature 1..21: note = Description of Combined DNA/RNA Molecule: Synthetic oligonucleotide
  source 1..21: mol_type = other RNA
caactcactgatgtcctggtt

SEQ ID NO: 1509 - RNA, 21 nt, synthetic construct
  modified_base 20..21: mod_base = OTHER; note = thymine
  misc_feature 1..21: note = Description of Artificial Sequence: Synthetic oligonucleotide
  misc_feature 1..21: note = Description of Combined DNA/RNA Molecule: Synthetic oligonucleotide
  source 1..21: mol_type = other RNA
caatccgcctgaaaactggtt

SEQ ID NO: 1510 - RNA, 21 nt, synthetic construct
  modified_base 20..21: mod_base = OTHER; note = thymine
  misc_feature 1..21: note = Description of Artificial Sequence: Synthetic oligonucleotide
  misc_feature 1..21: note = Description of Combined DNA/RNA Molecule: Synthetic oligonucleotide
  source 1..21: mol_type = other RNA
tgttttctcagatatggtgtt

SEQ ID NO: 1511 - RNA, 21 nt, synthetic construct
  modified_base 20..21: mod_base = OTHER; note = thymine
  misc_feature 1..21: note = Description of Artificial Sequence: Synthetic oligonucleotide
  misc_feature 1..21: note = Description of Combined DNA/RNA Molecule: Synthetic oligonucleotide
  source 1..21: mol_type = other RNA
tttgtatttatttttactttt

SEQ ID NO: 1512 - RNA, 21 nt, synthetic construct
  modified_base 20..21: mod_base = OTHER; note = thymine
  misc_feature 1..21: note = Description of Artificial Sequence: Synthetic oligonucleotide
  misc_feature 1..21: note = Description of Combined DNA/RNA Molecule: Synthetic oligonucleotide
  source 1..21: mol_type = other RNA
aactcaagcacctgggtgctt

SEQ ID NO: 1513 - RNA, 21 nt, synthetic construct
  modified_base 20..21: mod_base = OTHER; note = thymine
  misc_feature 1..21: note = Description of Artificial Sequence: Synthetic oligonucleotide
  misc_feature 1..21: note = Description of Combined DNA/RNA Molecule: Synthetic oligonucleotide
  source 1..21: mol_type = other RNA
cttgaagtaaatggtgttatt

SEQ ID NO: 1514 - RNA, 21 nt, synthetic construct
  modified_base 20..21: mod_base = OTHER; note = thymine
  misc_feature 1..21: note = Description of Artificial Sequence: Synthetic oligonucleotide
  misc_feature 1..21: note = Description of Combined DNA/RNA Molecule: Synthetic oligonucleotide
  source 1..21: mol_type = other RNA
atgtcatcacctttgaaggtt

SEQ ID NO: 1515 - RNA, 21 nt, synthetic construct
  modified_base 20..21: mod_base = OTHER; note = thymine
  misc_feature 1..21: note = Description of Artificial Sequence: Synthetic oligonucleotide
  misc_feature 1..21: note = Description of Combined DNA/RNA Molecule: Synthetic oligonucleotide
  source 1..21: mol_type = other RNA
aaagcgggaattggccttgtt

SEQ ID NO: 1516 - RNA, 21 nt, synthetic construct
  modified_base 20..21: mod_base = OTHER; note = thymine
  misc_feature 1..21: note = Description of Artificial Sequence: Synthetic oligonucleotide
  misc_feature 1..21: note = Description of Combined DNA/RNA Molecule: Synthetic oligonucleotide
  source 1..21: mol_type = other RNA
agctgctccttcaaactgatt

SEQ ID NO: 1517 - RNA, 21 nt, synthetic construct
  modified_base 20..21: mod_base = OTHER; note = thymine
  misc_feature 1..21: note = Description of Artificial Sequence: Synthetic oligonucleotide
  misc_feature 1..21: note = Description of Combined DNA/RNA Molecule: Synthetic oligonucleotide
  source 1..21: mol_type = other RNA
tgacaggtcacgcagtccctt

SEQ ID NO: 1518 - RNA, 21 nt, synthetic construct
  modified_base 20..21: mod_base = OTHER; note = thymine
  misc_feature 1..21: note = Description of Artificial Sequence: Synthetic oligonucleotide
  misc_feature 1..21: note = Description of Combined DNA/RNA Molecule: Synthetic oligonucleotide
  source 1..21: mol_type = other RNA
caaaaaggcgattggctgatt

SEQ ID NO: 1519 - RNA, 21 nt, synthetic construct
  modified_base 20..21: mod_base = OTHER; note = thymine
  misc_feature 1..21: note = Description of Artificial Sequence: Synthetic oligonucleotide
  misc_feature 1..21: note = Description of Combined DNA/RNA Molecule: Synthetic oligonucleotide
  source 1..21: mol_type = other RNA
tcattgatggcttccgaggtt

SEQ ID NO: 1520 - RNA, 21 nt, synthetic construct
  modified_base 20..21: mod_base = OTHER; note = thymine
  misc_feature 1..21: note = Description of Artificial Sequence: Synthetic oligonucleotide
  misc_feature 1..21: note = Description of Combined DNA/RNA Molecule: Synthetic oligonucleotide
  source 1..21: mol_type = other RNA
ggaaaatgttatcattgtctt

SEQ ID NO: 1521 - RNA, 21 nt, synthetic construct
  modified_base 20..21: mod_base = OTHER; note = thymine
  misc_feature 1..21: note = Description of Artificial Sequence: Synthetic oligonucleotide
  misc_feature 1..21: note = Description of Combined DNA/RNA Molecule: Synthetic oligonucleotide
  source 1..21: mol_type = other RNA
aagaggtgcaaagaataagtt

SEQ ID NO: 1522 - RNA, 21 nt, synthetic construct
  modified_base 20..21: mod_base = OTHER; note = thymine
  misc_feature 1..21: note = Description of Artificial Sequence: Synthetic oligonucleotide
  misc_feature 1..21: note = Description of Combined DNA/RNA Molecule: Synthetic oligonucleotide
  source 1..21: mol_type = other RNA
ttagcgaacggccagcaattt

SEQ ID NO: 1523 - RNA, 21 nt, synthetic construct
  modified_base 20..21: mod_base = OTHER; note = thymine
  misc_feature 1..21: note = Description of Artificial Sequence: Synthetic oligonucleotide
  misc_feature 1..21: note = Description of Combined DNA/RNA Molecule: Synthetic oligonucleotide
  source 1..21: mol_type = other RNA
ttcactgccttcttcattttt

SEQ ID NO: 1524 - RNA, 21 nt, synthetic construct
  modified_base 20..21: mod_base = OTHER; note = thymine
  misc_feature 1..21: note = Description of Artificial Sequence: Synthetic oligonucleotide
  misc_feature 1..21: note = Description of Combined DNA/RNA Molecule: Synthetic oligonucleotide
  source 1..21: mol_type = other RNA
ggctccatataccaactcatt

SEQ ID NO: 1525 - RNA, 21 nt, synthetic construct
  modified_base 20..21: mod_base = OTHER; note = thymine
  misc_feature 1..21: note = Description of Artificial Sequence: Synthetic oligonucleotide
  misc_feature 1..21: note = Description of Combined DNA/RNA Molecule: Synthetic oligonucleotide
  source 1..21: mol_type = other RNA
acctccatcagttgctggatt

SEQ ID NO: 1526 - RNA, 21 nt, synthetic construct
  modified_base 20..21: mod_base = OTHER; note = thymine
  misc_feature 1..21: note = Description of Artificial Sequence: Synthetic oligonucleotide
  misc_feature 1..21: note = Description of Combined DNA/RNA Molecule: Synthetic oligonucleotide
  source 1..21: mol_type = other RNA
ttttccagaggttacagtttt

SEQ ID NO: 1527 - RNA, 21 nt, synthetic construct
  modified_base 20..21: mod_base = OTHER; note = thymine
  misc_feature 1..21: note = Description of Artificial Sequence: Synthetic oligonucleotide
  misc_feature 1..21: note = Description of Combined DNA/RNA Molecule: Synthetic oligonucleotide
  source 1..21: mol_type = other RNA
ttggacacccatttgttgatt

SEQ ID NO: 1528 - RNA, 21 nt, synthetic construct
  modified_base 20..21: mod_base = OTHER; note = thymine
  misc_feature 1..21: note = Description of Artificial Sequence: Synthetic oligonucleotide
  misc_feature 1..21: note = Description of Combined DNA/RNA Molecule: Synthetic oligonucleotide
  source 1..21: mol_type = other RNA
gaatacatggccgctaatctt

SEQ ID NO: 1529 - RNA, 21 nt, synthetic construct
  modified_base 20..21: mod_base = OTHER; note = thymine
  misc_feature 1..21: note = Description of Artificial Sequence: Synthetic oligonucleotide
  misc_feature 1..21: note = Description of Combined DNA/RNA Molecule: Synthetic oligonucleotide
  source 1..21: mol_type = other RNA
tgaagggcaactcaagcactt

SEQ ID NO: 1530 - RNA, 21 nt, synthetic construct
  modified_base 20..21: mod_base = OTHER; note = thymine
  misc_feature 1..21: note = Description of Artificial Sequence: Synthetic oligonucleotide
  misc_feature 1..21: note = Description of Combined DNA/RNA Molecule: Synthetic oligonucleotide
  source 1..21: mol_type = other RNA
gtcatctcggccttctgcatt

SEQ ID NO: 1531 - RNA, 21 nt, synthetic construct
  modified_base 20..21: mod_base = OTHER; note = thymine
  misc_feature 1..21: note = Description of Artificial Sequence: Synthetic oligonucleotide
  misc_feature 1..21: note = Description of Combined DNA/RNA Molecule: Synthetic oligonucleotide
  source 1..21: mol_type = other RNA
gttcacaaaccaaaaatagtt

SEQ ID NO: 1532 - RNA, 21 nt, synthetic construct
  modified_base 20..21: mod_base = OTHER; note = thymine
  misc_feature 1..21: note = Description of Artificial Sequence: Synthetic oligonucleotide
  misc_feature 1..21: note = Description of Combined DNA/RNA Molecule: Synthetic oligonucleotide
  source 1..21: mol_type = other RNA
acttgcagctgcttcactgtt

SEQ ID NO: 1533 - RNA, 21 nt, synthetic construct
  modified_base 20..21: mod_base = OTHER; note = thymine
  misc_feature 1..21: note = Description of Artificial Sequence: Synthetic oligonucleotide
  misc_feature 1..21: note = Description of Combined DNA/RNA Molecule: Synthetic oligonucleotide
  source 1..21: mol_type = other RNA
cttcggtcttattggacactt

SEQ ID NO: 1534 - RNA, 21 nt, synthetic construct
  modified_base 20..21: mod_base = OTHER; note = thymine
  misc_feature 1..21: note = Description of Artificial Sequence: Synthetic oligonucleotide
  misc_feature 1..21: note = Description of Combined DNA/RNA Molecule: Synthetic oligonucleotide
  source 1..21: mol_type = other RNA
atcatctcctccaattcattt

SEQ ID NO: 1535 - RNA, 21 nt, synthetic construct
  modified_base 20..21: mod_base = OTHER; note = thymine
  misc_feature 1..21: note = Description of Artificial Sequence: Synthetic oligonucleotide
  misc_feature 1..21: note = Description of Combined DNA/RNA Molecule: Synthetic oligonucleotide
  source 1..21: mol_type = other RNA
ttcctggtacatcatagattt

SEQ ID NO: 1536 - RNA, 21 nt, synthetic construct
  modified_base 20..21: mod_base = OTHER; note = thymine
  misc_feature 1..21: note = Description of Artificial Sequence: Synthetic oligonucleotide
  misc_feature 1..21: note = Description of Combined DNA/RNA Molecule: Synthetic oligonucleotide
  source 1..21: mol_type = other RNA
ctcaagaaatgccttatggtt

SEQ ID NO: 1537 - RNA, 21 nt, synthetic construct
  modified_base 20..21: mod_base = OTHER; note = thymine
  misc_feature 1..21: note = Description of Artificial Sequence: Synthetic oligonucleotide
  misc_feature 1..21: note = Description of Combined DNA/RNA Molecule: Synthetic oligonucleotide
  source 1..21: mol_type = other RNA
aatgccttatggaatgcattt

SEQ ID NO: 1538 - RNA, 21 nt, synthetic construct
  modified_base 20..21: mod_base = OTHER; note = thymine
  misc_feature 1..21: note = Description of Artificial Sequence: Synthetic oligonucleotide
  misc_feature 1..21: note = Description of Combined DNA/RNA Molecule: Synthetic oligonucleotide
  source 1..21: mol_type = other RNA
atggtgttaaccagcaccatt

SEQ ID NO: 1539 - RNA, 21 nt, synthetic construct
  modified_base 20..21: mod_base = OTHER; note = thymine
  misc_feature 1..21: note = Description of Artificial Sequence: Synthetic oligonucleotide
  misc_feature 1..21: note = Description of Combined DNA/RNA Molecule: Synthetic oligonucleotide
  source 1..21: mol_type = other RNA
ttttcagggctgaacagattt

SEQ ID NO: 1540 - RNA, 21 nt, synthetic construct
  modified_base 20..21: mod_base = OTHER; note = thymine
  misc_feature 1..21: note = Description of Artificial Sequence: Synthetic oligonucleotide
  misc_feature 1..21: note = Description of Combined DNA/RNA Molecule: Synthetic oligonucleotide
  source 1..21: mol_type = other RNA
tggaccaccagcatcatcttt

SEQ ID NO: 1541 - RNA, 21 nt, synthetic construct
  modified_base 20..21: mod_base = OTHER; note = thymine
  misc_feature 1..21: note = Description of Artificial Sequence: Synthetic oligonucleotide
  misc_feature 1..21: note = Description of Combined DNA/RNA Molecule: Synthetic oligonucleotide
  source 1..21: mol_type = other RNA
ctggagcttggctccatattt

SEQ ID NO: 1542 - RNA, 21 nt, synthetic construct
  modified_base 20..21: mod_base = OTHER; note = thymine
  misc_feature 1..21: note = Description of Artificial Sequence: Synthetic oligonucleotide
  misc_feature 1..21: note = Description of Combined DNA/RNA Molecule: Synthetic oligonucleotide
  source 1..21: mol_type = other RNA
aatgacatcggtgattcggtt

SEQ ID NO: 1543 - RNA, 21 nt, synthetic construct
  modified_base 20..21: mod_base = OTHER; note = thymine
  misc_feature 1..21: note = Description of Artificial Sequence: Synthetic oligonucleotide
  misc_feature 1..21: note = Description of Combined DNA/RNA Molecule: Synthetic oligonucleotide
  source 1..21: mol_type = other RNA
ccgctctggattgctctgctt

SEQ ID NO: 1544 - RNA, 21 nt, synthetic construct
  modified_base 20..21: mod_base = OTHER; note = thymine
  misc_feature 1..21: note = Description of Artificial Sequence: Synthetic oligonucleotide
  misc_feature 1..21: note = Description of Combined DNA/RNA Molecule: Synthetic oligonucleotide
  source 1..21: mol_type = other RNA
cccttgaagtaaatggtgttt

SEQ ID NO: 1545 - RNA, 21 nt, synthetic construct
  modified_base 20..21: mod_base = OTHER; note = thymine
  misc_feature 1..21: note = Description of Artificial Sequence: Synthetic oligonucleotide
  misc_feature 1..21: note = Description of Combined DNA/RNA Molecule: Synthetic oligonucleotide
  source 1..21: mol_type = other RNA
gaacttgccttcctggtactt

SEQ ID NO: 1546 - RNA, 21 nt, synthetic construct
  modified_base 20..21: mod_base = OTHER; note = thymine
  misc_feature 1..21: note = Description of Artificial Sequence: Synthetic oligonucleotide
  misc_feature 1..21: note = Description of Combined DNA/RNA Molecule: Synthetic oligonucleotide
  source 1..21: mol_type = other RNA
ctcttctcaggcttgggcatt

SEQ ID NO: 1547 - RNA, 21 nt, synthetic construct
  modified_base 20..21: mod_base = OTHER; note = thymine
  misc_feature 1..21: note = Description of Artificial Sequence: Synthetic oligonucleotide
  misc_feature 1..21: note = Description of Combined DNA/RNA Molecule: Synthetic oligonucleotide
  source 1..21: mol_type = other RNA
agttcagtttggcaaagaatt

SEQ ID NO: 1548 - RNA, 21 nt, synthetic construct
  modified_base 20..21: mod_base = OTHER; note = thymine
  misc_feature 1..21: note = Description of Artificial Sequence: Synthetic oligonucleotide
  misc_feature 1..21: note = Description of Combined DNA/RNA Molecule: Synthetic oligonucleotide
  source 1..21: mol_type = other RNA
tccttctctaccttggccatt

SEQ ID NO: 1549 - RNA, 21 nt, synthetic construct
  modified_base 20..21: mod_base = OTHER; note = thymine
  misc_feature 1..21: note = Description of Artificial Sequence: Synthetic oligonucleotide
  misc_feature 1..21: note = Description of Combined DNA/RNA Molecule: Synthetic oligonucleotide
  source 1..21: mol_type = other RNA
tccagccactcttgcagcatt

SEQ ID NO: 1550 - RNA, 21 nt, synthetic construct
  modified_base 20..21: mod_base = OTHER; note = thymine
  misc_feature 1..21: note = Description of Artificial Sequence: Synthetic oligonucleotide
  misc_feature 1..21: note = Description of Combined DNA/RNA Molecule: Synthetic oligonucleotide
  source 1..21: mol_type = other RNA
gagcggtaaatgcacatggtt

SEQ ID NO: 1551 - RNA, 21 nt, synthetic construct
  modified_base 20..21: mod_base = OTHER; note = thymine
  misc_feature 1..21: note = Description of Artificial Sequence: Synthetic oligonucleotide
  misc_feature 1..21: note = Description of Combined DNA/RNA Molecule: Synthetic oligonucleotide
  source 1..21: mol_type = other RNA
atcgacaaggcccatgtcttt

SEQ ID NO: 1552 - RNA, 21 nt, synthetic construct
  modified_base 20..21: mod_base = OTHER; note = thymine
  misc_feature 1..21: note = Description of Artificial Sequence: Synthetic oligonucleotide
  misc_feature 1..21: note = Description of Combined DNA/RNA Molecule: Synthetic oligonucleotide
  source 1..21: mol_type = other RNA
aagggatttgtctccaaaatt

SEQ ID NO: 1553 - RNA, 21 nt, synthetic construct
  modified_base 20..21: mod_base = OTHER; note = thymine
  misc_feature 1..21: note = Description of Artificial Sequence: Synthetic oligonucleotide
  misc_feature 1..21: note = Description of Combined DNA/RNA Molecule: Synthetic oligonucleotide
  source 1..21: mol_type = other RNA
ctgttctgagccctcatcctt

SEQ ID NO: 1554 - RNA, 21 nt, synthetic construct
  modified_base 20..21: mod_base = OTHER; note = thymine
  misc_feature 1..21: note = Description of Artificial Sequence: Synthetic oligonucleotide
  misc_feature 1..21: note = Description of Combined DNA/RNA Molecule: Synthetic oligonucleotide
  source 1..21: mol_type = other RNA
ttggtcatagcaaaagccgtt

SEQ ID NO: 1555 - RNA, 21 nt, synthetic construct
  modified_base 20..21: mod_base = OTHER; note = thymine
  misc_feature 1..21: note = Description of Artificial Sequence: Synthetic oligonucleotide
  misc_feature 1..21: note = Description of Combined DNA/RNA Molecule: Synthetic oligonucleotide
  source 1..21: mol_type = other RNA
aagtccaggggctggagcttt

SEQ ID NO: 1556 - RNA, 21 nt, synthetic construct
  modified_base 20..21: mod_base = OTHER; note = thymine
  misc_feature 1..21: note = Description of Artificial Sequence: Synthetic oligonucleotide
  misc_feature 1..21: note = Description of Combined DNA/RNA Molecule: Synthetic oligonucleotide
  source 1..21: mol_type = other RNA
aagaagtggatctgatcagtt

SEQ ID NO: 1557 - RNA, 21 nt, synthetic construct
  modified_base 20..21: mod_base = OTHER; note = thymine
  misc_feature 1..21: note = Description of Artificial Sequence: Synthetic oligonucleotide
  misc_feature 1..21: note = Description of Combined DNA/RNA Molecule: Synthetic oligonucleotide
  source 1..21: mol_type = other RNA
ggcatgtggaccaccagcatt

SEQ ID NO: 1558 - RNA, 21 nt, synthetic construct
  modified_base 20..21: mod_base = OTHER; note = thymine
  misc_feature 1..21: note = Description of Artificial Sequence: Synthetic oligonucleotide
  misc_feature 1..21: note = Description of Combined DNA/RNA Molecule: Synthetic oligonucleotide
  source 1..21: mol_type = other RNA
tctttcctctaaatctcgctt

SEQ ID NO: 1559 - RNA, 21 nt, synthetic construct
  modified_base 20..21: mod_base = OTHER; note = thymine
  misc_feature 1..21: note = Description of Artificial Sequence: Synthetic oligonucleotide
  misc_feature 1..21: note = Description of Combined DNA/RNA Molecule: Synthetic oligonucleotide
  source 1..21: mol_type = other RNA
cccagaagccaatgagcagtt

SEQ ID NO: 1560 - RNA, 21 nt, synthetic construct
  modified_base 20..21: mod_base = OTHER; note = thymine
  misc_feature 1..21: note = Description of Artificial Sequence: Synthetic oligonucleotide
  misc_feature 1..21: note = Description of Combined DNA/RNA Molecule: Synthetic oligonucleotide
  source 1..21: mol_type = other RNA
tggtaggtctcattgaaggtt

SEQ ID NO: 1561 - RNA, 21 nt, synthetic construct
  modified_base 20..21: mod_base = OTHER; note = thymine
  misc_feature 1..21: note = Description of Artificial Sequence: Synthetic oligonucleotide
  misc_feature 1..21: note = Description of Combined DNA/RNA Molecule: Synthetic oligonucleotide
  source 1..21: mol_type = other RNA
ggcccttgaagtaaatggttt

SEQ ID NO: 1562 - RNA, 21 nt, synthetic construct
  modified_base 20..21: mod_base = OTHER; note = thymine
  misc_feature 1..21: note = Description of Artificial Sequence: Synthetic oligonucleotide
  misc_feature 1..21: note = Description of Combined DNA/RNA Molecule: Synthetic oligonucleotide
  source 1..21: mol_type = other RNA
caaaaataggaagaggtgctt

SEQ ID NO: 1563 - RNA, 21 nt, synthetic construct
  modified_base 20..21: mod_base = OTHER; note = thymine
  misc_feature 1..21: note = Description of Artificial Sequence: Synthetic oligonucleotide
  misc_feature 1..21: note = Description of Combined DNA/RNA Molecule: Synthetic oligonucleotide
  source 1..21: mol_type = other RNA
cctgggtgccttcagccactt

SEQ ID NO: 1564 - RNA, 21 nt, synthetic construct
  modified_base 20..21: mod_base = OTHER; note = thymine
  misc_feature 1..21: note = Description of Artificial Sequence: Synthetic oligonucleotide
  misc_feature 1..21: note = Description of Combined DNA/RNA Molecule: Synthetic oligonucleotide
  source 1..21: mol_type = other RNA
aagccgtcctcaatgcggatt

SEQ ID NO: 1565 - RNA, 21 nt, synthetic construct
  modified_base 20..21: mod_base = OTHER; note = thymine
  misc_feature 1..21: note = Description of Artificial Sequence: Synthetic oligonucleotide
  misc_feature 1..21: note = Description of Combined DNA/RNA Molecule: Synthetic oligonucleotide
  source 1..21: mol_type = other RNA
ttggctgtgcagatgtccatt

SEQ ID NO: 1566 - RNA, 21 nt, synthetic construct
  modified_base 20..21: mod_base = OTHER; note = thymine
  misc_feature 1..21: note = Description of Artificial Sequence: Synthetic oligonucleotide
  misc_feature 1..21: note = Description of Combined DNA/RNA Molecule: Synthetic oligonucleotide
  source 1..21: mol_type = other RNA
aatacctgggagtttggactt

SEQ ID NO: 1567 - RNA, 21 nt, synthetic construct
  modified_base 20..21: mod_base = OTHER; note = thymine
  misc_feature 1..21: note = Description of Artificial Sequence: Synthetic oligonucleotide
  misc_feature 1..21: note = Description of Combined DNA/RNA Molecule: Synthetic oligonucleotide
  source 1..21: mol_type = other RNA
tctggggtgagttccttcttt

SEQ ID NO: 1568 - RNA, 21 nt, synthetic construct
  modified_base 20..21: mod_base = OTHER; note = thymine
  misc_feature 1..21: note = Description of Artificial Sequence: Synthetic oligonucleotide
  misc_feature 1..21: note = Description of Combined DNA/RNA Molecule: Synthetic oligonucleotide
  source 1..21: mol_type = other RNA
ttcttcatttacctcaagatt

SEQ ID NO: 1569 - RNA, 21 nt, synthetic construct
  modified_base 20..21: mod_base = OTHER; note = thymine
  misc_feature 1..21: note = Description of Artificial Sequence: Synthetic oligonucleotide
  misc_feature 1..21: note = Description of Combined DNA/RNA Molecule: Synthetic oligonucleotide
  source 1..21: mol_type = other RNA
tgcagatgtccacagggcttt

SEQ ID NO: 1570 - RNA, 21 nt, synthetic construct
  modified_base 20..21: mod_base = OTHER; note = thymine
  misc_feature 1..21: note = Description of Artificial Sequence: Synthetic oligonucleotide
  misc_feature 1..21: note = Description of Combined DNA/RNA Molecule: Synthetic oligonucleotide
  source 1..21: mol_type = other RNA
tttgttgatggccgctctgtt

SEQ ID NO: 1571 - RNA, 21 nt, synthetic construct
  modified_base 20..21: mod_base = OTHER; note = thymine
  misc_feature 1..21: note = Description of Artificial Sequence: Synthetic oligonucleotide
  misc_feature 1..21: note = Description of Combined DNA/RNA Molecule: Synthetic oligonucleotide
  source 1..21: mol_type = other RNA
tatggtgtcaaacttaaattt

SEQ ID NO: 1572 - RNA, 21 nt, synthetic construct
  modified_base 20..21: mod_base = OTHER; note = thymine
  misc_feature 1..21: note = Description of Artificial Sequence: Synthetic oligonucleotide
  misc_feature 1..21: note = Description of Combined DNA/RNA Molecule: Synthetic oligonucleotide
  source 1..21: mol_type = other RNA
cttggccaggctcttctcatt

SEQ ID NO: 1573 - RNA, 21 nt, synthetic construct
  modified_base 20..21: mod_base = OTHER; note = thymine
  misc_feature 1..21: note = Description of Artificial Sequence: Synthetic oligonucleotide
  misc_feature 1..21: note = Description of Combined DNA/RNA Molecule: Synthetic oligonucleotide
  source 1..21: mol_type = other RNA
aagatgaggaccatggtgatt

SEQ ID NO: 1574 - RNA, 21 nt, synthetic construct
  modified_base 20..21: mod_base = OTHER; note = thymine
  misc_feature 1..21: note = Description of Artificial Sequence: Synthetic oligonucleotide
  misc_feature 1..21: note = Description of Combined DNA/RNA Molecule: Synthetic oligonucleotide
  source 1..21: mol_type = other RNA
ttgtagaacagttccttcctt

SEQ ID NO: 1575 - RNA, 21 nt, synthetic construct
  modified_base 20..21: mod_base = OTHER; note = thymine
  misc_feature 1..21: note = Description of Artificial Sequence: Synthetic oligonucleotide
  misc_feature 1..21: note = Description of Combined DNA/RNA Molecule: Synthetic oligonucleotide
  source 1..21: mol_type = other RNA
cttctcttataaaaaccagtt

SEQ ID NO: 1576 - RNA, 21 nt, synthetic construct
  modified_base 20..21: mod_base = OTHER; note = thymine
  misc_feature 1..21: note = Description of Artificial Sequence: Synthetic oligonucleotide
  misc_feature 1..21: note = Description of Combined DNA/RNA Molecule: Synthetic oligonucleotide
  source 1..21: mol_type = other RNA
tgtcattacaggcacccagtt

SEQ ID NO: 1577 - RNA, 21 nt, synthetic construct
  modified_base 20..21: mod_base = OTHER; note = thymine
  misc_feature 1..21: note = Description of Artificial Sequence: Synthetic oligonucleotide
  misc_feature 1..21: note = Description of Combined DNA/RNA Molecule: Synthetic oligonucleotide
  source 1..21: mol_type = other RNA
gcaatcacaacagcggtactt

SEQ ID NO: 1578 - RNA, 21 nt, synthetic construct
  modified_base 20..21: mod_base = OTHER; note = thymine
  misc_feature 1..21: note = Description of Artificial Sequence: Synthetic oligonucleotide
  misc_feature 1..21: note = Description of Combined DNA/RNA Molecule: Synthetic oligonucleotide
  source 1..21: mol_type = other RNA
tctgccaggtgctgatagatt

SEQ ID NO: 1579 - RNA, 21 nt, synthetic construct
  modified_base 20..21: mod_base = OTHER; note = thymine
  misc_feature 1..21: note = Description of Artificial Sequence: Synthetic oligonucleotide
  misc_feature 1..21: note = Description of Combined DNA/RNA Molecule: Synthetic oligonucleotide
  source 1..21: mol_type = other RNA
cattcttggaatctgccagtt

SEQ ID NO: 1580 - RNA, 21 nt, synthetic construct
  modified_base 20..21: mod_base = OTHER; note = thymine
  misc_feature 1..21: note = Description of Artificial Sequence: Synthetic oligonucleotide
  misc_feature 1..21: note = Description of Combined DNA/RNA Molecule: Synthetic oligonucleotide
  source 1..21: mol_type = other RNA
ttccgagggaatgacatcgtt

SEQ ID NO: 1581 - RNA, 21 nt, synthetic construct
  modified_base 20..21: mod_base = OTHER; note = thymine
  misc_feature 1..21: note = Description of Artificial Sequence: Synthetic oligonucleotide
  misc_feature 1..21: note = Description of Combined DNA/RNA Molecule: Synthetic oligonucleotide
  source 1..21: mol_type = other RNA
gtcacgcagtcccagaagctt

SEQ ID NO: 1582 - RNA, 21 nt, synthetic construct
  modified_base 20..21: mod_base = OTHER; note = thymine
  misc_feature 1..21: note = Description of Artificial Sequence: Synthetic oligonucleotide
  misc_feature 1..21: note = Description of Combined DNA/RNA Molecule: Synthetic oligonucleotide
  source 1..21: mol_type = other RNA
acagggctcccgtgacaggtt

SEQ ID NO: 1583 - RNA, 21 nt, synthetic construct
  modified_base 20..21: mod_base = OTHER; note = thymine
  misc_feature 1..21: note = Description of Artificial Sequence: Synthetic oligonucleotide
  misc_feature 1..21: note = Description of Combined DNA/RNA Molecule: Synthetic oligonucleotide
  source 1..21: mol_type = other RNA
acaggcccttgaagtaaattt

SEQ ID NO: 1584 - RNA, 21 nt, synthetic construct
  modified_base 20..21: mod_base = OTHER; note = thymine
  misc_feature 1..21: note = Description of Artificial Sequence: Synthetic oligonucleotide
  misc_feature 1..21: note = Description of Combined DNA/RNA Molecule: Synthetic oligonucleotide
  source 1..21: mol_type = other RNA
ctgatagaaagtggtagcatt

SEQ ID NO: 1585 - RNA, 21 nt, synthetic construct
  modified_base 20..21: mod_base = OTHER; note = thymine
  misc_feature 1..21: note = Description of Artificial Sequence: Synthetic oligonucleotide
  misc_feature 1..21: note = Description of Combined DNA/RNA Molecule: Synthetic oligonucleotide
  source 1..21: mol_type = other RNA
attggccttggacagttcctt

SEQ ID NO: 1586 - RNA, 21 nt, synthetic construct
  modified_base 20..21: mod_base = OTHER; note = thymine
  misc_feature 1..21: note = Description of Artificial Sequence: Synthetic oligonucleotide
  misc_feature 1..21: note = Description of Combined DNA/RNA Molecule: Synthetic oligonucleotide
  source 1..21: mol_type = other RNA
actaacttggaggatttgttt

SEQ ID NO: 1587 - RNA, 21 nt, synthetic construct
  modified_base 20..21: mod_base = OTHER; note = thymine
  misc_feature 1..21: note = Description of Artificial Sequence: Synthetic oligonucleotide
  misc_feature 1..21: note = Description of Combined DNA/RNA Molecule: Synthetic oligonucleotide
  source 1..21: mol_type = other RNA
tctccggggagcggtaaattt

SEQ ID NO: 1588 - RNA, 21 nt, synthetic construct
  modified_base 20..21: mod_base = OTHER; note = thymine
  misc_feature 1..21: note = Description of Artificial Sequence: Synthetic oligonucleotide
  misc_feature 1..21: note = Description of Combined DNA/RNA Molecule: Synthetic oligonucleotide
  source 1..21: mol_type = other RNA
cgtggagatactcaggggttt

SEQ ID NO: 1589 - RNA, 21 nt, synthetic construct
  modified_base 20..21: mod_base = OTHER; note = thymine
  misc_feature 1..21: note = Description of Artificial Sequence: Synthetic oligonucleotide
  misc_feature 1..21: note = Description of Combined DNA/RNA Molecule: Synthetic oligonucleotide
  source 1..21: mol_type = other RNA
tgggcaagtggagatagtgtt

SEQ ID NO: 1590 - RNA, 21 nt, synthetic construct
  modified_base 20..21: mod_base = OTHER; note = thymine
  misc_feature 1..21: note = Description of Artificial Sequence: Synthetic oligonucleotide
  misc_feature 1..21: note = Description of Combined DNA/RNA Molecule: Synthetic oligonucleotide
  source 1..21: mol_type = other RNA
atggaagtagtttgtattttt

SEQ ID NO: 1591 - RNA, 21 nt, synthetic construct
  modified_base 20..21: mod_base = OTHER; note = thymine
  misc_feature 1..21: note = Description of Artificial Sequence: Synthetic oligonucleotide
  misc_feature 1..21: note = Description of Combined DNA/RNA Molecule: Synthetic oligonucleotide
  source 1..21: mol_type = other RNA
agtaaatggtgttaaccagtt

SEQ ID NO: 1592 - RNA, 21 nt, synthetic construct
  modified_base 20..21: mod_base = OTHER; note = thymine
  misc_feature 1..21: note = Description of Artificial Sequence: Synthetic oligonucleotide
  misc_feature 1..21: note = Description of Combined DNA/RNA Molecule: Synthetic oligonucleotide
  source 1..21: mol_type = other RNA
tcaggcttgggcaagatgatt

SEQ ID NO: 1593 - RNA, 21 nt, synthetic construct
  modified_base 20..21: mod_base = OTHER; note = thymine
  misc_feature 1..21: note = Description of Artificial Sequence: Synthetic oligonucleotide
  misc_feature 1..21: note = Description of Combined DNA/RNA Molecule: Synthetic oligonucleotide
  source 1..21: mol_type = other RNA
gagatagtgtgatctgaggtt

SEQ ID NO: 1594 - RNA, 21 nt, synthetic construct
  modified_base 20..21: mod_base = OTHER; note = thymine
  misc_feature 1..21: note = Description of Artificial Sequence: Synthetic oligonucleotide
  misc_feature 1..21: note = Description of Combined DNA/RNA Molecule: Synthetic oligonucleotide
  source 1..21: mol_type = other RNA
cagaggttccagaggacagtt

SEQ ID NO: 1595 - RNA, 21 nt, synthetic construct
  modified_base 20..21: mod_base = OTHER; note = thymine
  misc_feature 1..21: note = Description of Artificial Sequence: Synthetic oligonucleotide
  misc_feature 1..21: note = Description of Combined DNA/RNA Molecule: Synthetic oligonucleotide
  source 1..21: mol_type = other RNA
ccgctaatcttccacagggtt

SEQ ID NO: 1596 - RNA, 21 nt, synthetic construct
  modified_base 20..21: mod_base = OTHER; note = thymine
  misc_feature 1..21: note = Description of Artificial Sequence: Synthetic oligonucleotide
  misc_feature 1..21: note = Description of Combined DNA/RNA Molecule: Synthetic oligonucleotide
  source 1..21: mol_type = other RNA
tagcaaaagccgtggagattt

SEQ ID NO: 1597 - RNA, 21 nt, synthetic construct
  modified_base 20..21: mod_base = OTHER; note = thymine
  misc_feature 1..21: note = Description of Artificial Sequence: Synthetic oligonucleotide
  misc_feature 1..21: note = Description of Combined DNA/RNA Molecule: Synthetic oligonucleotide
  source 1..21: mol_type = other RNA
ctccaattcatccagccactt

SEQ ID NO: 1598 - RNA, 21 nt, synthetic construct
  modified_base 20..21: mod_base = OTHER; note = thymine
  misc_feature 1..21: note = Description of Artificial Sequence: Synthetic oligonucleotide
  misc_feature 1..21: note = Description of Combined DNA/RNA Molecule: Synthetic oligonucleotide
  source 1..21: mol_type = other RNA
attggctgatactaacttgtt

SEQ ID NO: 1599 - RNA, 21 nt, synthetic construct
  modified_base 20..21: mod_base = OTHER; note = thymine
  misc_feature 1..21: note = Description of Artificial Sequence: Synthetic oligonucleotide
  misc_feature 1..21: note = Description of Combined DNA/RNA Molecule: Synthetic oligonucleotide
  source 1..21: mol_type = other RNA
accatggtgatgtcatcactt

SEQ ID NO: 1600 - RNA, 21 nt, synthetic construct
  modified_base 20..21: mod_base = OTHER; note = thymine
  misc_feature 1..21: note = Description of Artificial Sequence: Synthetic oligonucleotide
  misc_feature 1..21: note = Description of Combined DNA/RNA Molecule: Synthetic oligonucleotide
  source 1..21: mol_type = other RNA
atcattgtcattcttggaatt

SEQ ID NO: 1601 - RNA, 21 nt, synthetic construct
  modified_base 20..21: mod_base = OTHER; note = thymine
  misc_feature 1..21: note = Description of Artificial Sequence: Synthetic oligonucleotide
  misc_feature 1..21: note = Description of Combined DNA/RNA Molecule: Synthetic oligonucleotide
  source 1..21: mol_type = other RNA
aacttaaatacctccatcatt

SEQ ID NO: 1602 - RNA, 21 nt, synthetic construct
  modified_base 20..21: mod_base = OTHER; note = thymine
  misc_feature 1..21: note = Description of Artificial Sequence: Synthetic oligonucleotide
  misc_feature 1..21: note = Description of Combined DNA/RNA Molecule: Synthetic oligonucleotide
  source 1..21: mol_type = other RNA
tcctatcacattggaatactt

SEQ ID NO: 1603 - RNA, 21 nt, synthetic construct
  modified_base 20..21: mod_base = OTHER; note = thymine
  misc_feature 1..21: note = Description of Artificial Sequence: Synthetic oligonucleotide
  misc_feature 1..21: note = Description of Combined DNA/RNA Molecule: Synthetic oligonucleotide
  source 1..21: mol_type = other RNA
atgtcccgcggcttggctgtt

SEQ ID NO: 1604 - RNA, 21 nt, synthetic construct
  modified_base 20..21: mod_base = OTHER; note = thymine
  misc_feature 1..21: note = Description of Artificial Sequence: Synthetic oligonucleotide
  misc_feature 1..21: note = Description of Combined DNA/RNA Molecule: Synthetic oligonucleotide
  source 1..21: mol_type = other RNA
aatgcggaagcggggcatgtt

SEQ ID NO: 1605 - RNA, 21 nt, synthetic construct
  modified_base 20..21: mod_base = OTHER; note = thymine
  misc_feature 1..21: note = Description of Artificial Sequence: Synthetic oligonucleotide
  misc_feature 1..21: note = Description of Combined DNA/RNA Molecule: Synthetic oligonucleotide
  source 1..21: mol_type = other RNA
gttacagttcctatcacattt

SEQ ID NO: 1606 - RNA, 21 nt, synthetic construct
  modified_base 20..21: mod_base = OTHER; note = thymine
  misc_feature 1..21: note = Description of Artificial Sequence: Synthetic oligonucleotide
  misc_feature 1..21: note = Description of Combined DNA/RNA Molecule: Synthetic oligonucleotide
  source 1..21: mol_type = other RNA
ttgaaggtaagggatttgttt

SEQ ID NO: 1607 - RNA, 21 nt, synthetic construct
  modified_base 20..21: mod_base = OTHER; note = thymine
  misc_feature 1..21: note = Description of Artificial Sequence: Synthetic oligonucleotide
  misc_feature 1..21: note = Description of Combined DNA/RNA Molecule: Synthetic oligonucleotide
  source 1..21: mol_type = other RNA
aaggacaaaagataaaccttt

SEQ ID NO: 1608 - RNA, 21 nt, synthetic construct
  modified_base 20..21: mod_base = OTHER; note = thymine
  misc_feature 1..21: note = Description of Artificial Sequence: Synthetic oligonucleotide
  misc_feature 1..21: note = Description of Combined DNA/RNA Molecule: Synthetic oligonucleotide
  source 1..21: mol_type = other RNA
ttggtggcctccgggatcttt

SEQ ID NO: 1609 - RNA, 21 nt, synthetic construct
  modified_base 20..21: mod_base = OTHER; note = thymine
  misc_feature 1..21: note = Description of Artificial Sequence: Synthetic oligonucleotide
  misc_feature 1..21: note = Description of Combined DNA/RNA Molecule: Synthetic oligonucleotide
  source 1..21: mol_type = other RNA
aggggtgacaggaaaatgttt

SEQ ID NO: 1610 - RNA, 21 nt, synthetic construct
  modified_base 20..21: mod_base = OTHER; note = thymine
  misc_feature 1..21: note = Description of Artificial Sequence: Synthetic oligonucleotide
  misc_feature 1..21: note = Description of Combined DNA/RNA Molecule: Synthetic oligonucleotide
  source 1..21: mol_type = other RNA
ataaaaaccaggaaaggcctt

SEQ ID NO: 1611 - RNA, 21 nt, synthetic construct
  modified_base 20..21: mod_base = OTHER; note = thymine
  misc_feature 1..21: note = Description of Artificial Sequence: Synthetic oligonucleotide
  misc_feature 1..21: note = Description of Combined DNA/RNA Molecule: Synthetic oligonucleotide
  source 1..21: mol_type = other RNA
aacattttacttaacacaatt

SEQ ID NO: 1612 - RNA, 21 nt, synthetic construct
  modified_base 20..21: mod_base = OTHER; note = thymine
  misc_feature 1..21: note = Description of Artificial Sequence: Synthetic oligonucleotide
  misc_feature 1..21: note = Description of Combined DNA/RNA Molecule: Synthetic oligonucleotide
  source 1..21: mol_type = other RNA
ttgctctgcattttccttgtt

SEQ ID NO: 1613 - RNA, 21 nt, synthetic construct
  modified_base 20..21: mod_base = OTHER; note = thymine
  misc_feature 1..21: note = Description of Artificial Sequence: Synthetic oligonucleotide
  misc_feature 1..21: note = Description of Combined DNA/RNA Molecule: Synthetic oligonucleotide
  source 1..21: mol_type = other RNA
tgatcagatgttttctcagtt

SEQ ID NO: 1614 - RNA, 21 nt, synthetic construct
  modified_base 20..21: mod_base = OTHER; note = thymine
  misc_feature 1..21: note = Description of Artificial Sequence: Synthetic oligonucleotide
  misc_feature 1..21: note = Description of Combined DNA/RNA Molecule: Synthetic oligonucleotide
  source 1..21: mol_type = other RNA
ccacaggcccttgaagtaatt

SEQ ID NO: 1615 - RNA, 21 nt, synthetic construct
  modified_base 20..21: mod_base = OTHER; note = thymine
  misc_feature 1..21: note = Description of Artificial Sequence: Synthetic oligonucleotide
  misc_feature 1..21: note = Description of Combined DNA/RNA Molecule: Synthetic oligonucleotide
  source 1..21: mol_type = other RNA
aaagtcaccctgttggggttt

SEQ ID NO: 1616 - RNA, 21 nt, synthetic construct
  modified_base 20..21: mod_base = OTHER; note = thymine
  misc_feature 1..21: note = Description of Artificial Sequence: Synthetic oligonucleotide
  misc_feature 1..21: note = Description of Combined DNA/RNA Molecule: Synthetic oligonucleotide
  source 1..21: mol_type = other RNA
cttctgcaacaatacctggtt

SEQ ID NO: 1617 - RNA, 21 nt, synthetic construct
  modified_base 20..21: mod_base = OTHER; note = thymine
  misc_feature 1..21: note = Description of Artificial Sequence: Synthetic oligonucleotide
  misc_feature 1..21: note = Description of Combined DNA/RNA Molecule: Synthetic oligonucleotide
  source 1..21: mol_type = other RNA
aactttgacttccacaggctt

SEQ ID NO: 1618 - RNA, 21 nt, synthetic construct
  modified_base 20..21: mod_base = OTHER; note = thymine
  misc_feature 1..21: note = Description of Combined DNA/RNA Molecule: Synthetic oligonucleotide
  source 1..21: mol_type = other RNA
aaatctcgcagaggttccatt

SEQ ID NO: 1619 - RNA, 21 nt, synthetic construct
  modified_base 20..21: mod_base = OTHER; note = thymine
  misc_feature 1..21: note = Description of Artificial Sequence: Synthetic oligonucleotide
  misc_feature 1..21: note = Description of Combined DNA/RNA Molecule: Synthetic oligonucleotide
  source 1..21: mol_type = other RNA
tccttgtgttctcagggcttt

SEQ ID NO: 1620 - RNA, 21 nt, synthetic construct
  modified_base 20..21: mod_base = OTHER; note = thymine
  misc_feature 1..21: note = Description of Artificial Sequence: Synthetic oligonucleotide
  misc_feature 1..21: note = Description of Combined DNA/RNA Molecule: Synthetic oligonucleotide
  source 1..21: mol_type = other RNA
atgcatctgagacatagagtt

SEQ ID NO: 1621 - RNA, 21 nt, synthetic construct
  modified_base 20..21: mod_base = OTHER; note = thymine
  misc_feature 1..21: note = Description of Artificial Sequence: Synthetic oligonucleotide
  misc_feature 1..21: note = Description of Combined DNA/RNA Molecule: Synthetic oligonucleotide
  source 1..21: mol_type = other RNA
tgattcggccttcggtctttt

SEQ ID NO: 1622 - RNA, 21 nt, synthetic construct
  modified_base 20..21: mod_base = OTHER; note = thymine
  misc_feature 1..21: note = Description of Artificial Sequence: Synthetic oligonucleotide
  misc_feature 1..21: note = Description of Combined DNA/RNA Molecule: Synthetic oligonucleotide
  source 1..21: mol_type = other RNA
aaagaataagaacattttatt

SEQ ID NO: 1623 - RNA, 21 nt, synthetic construct
  modified_base 20..21: mod_base = OTHER; note = thymine
  misc_feature 1..21: note = Description of Artificial Sequence: Synthetic oligonucleotide
  misc_feature 1..21: note = Description of Combined DNA/RNA Molecule: Synthetic oligonucleotide
  source 1..21: mol_type = other RNA
aaaccttcctttttccagatt

SEQ ID NO: 1624 - RNA, 21 nt, synthetic construct
  modified_base 20..21: mod_base = OTHER; note = thymine
  misc_feature 1..21: note = Description of Artificial Sequence: Synthetic oligonucleotide
  misc_feature 1..21: note = Description of Combined DNA/RNA Molecule: Synthetic oligonucleotide
  source 1..21: mol_type = other RNA
aaggcctgttggccttgaatt

SEQ ID NO: 1625 - RNA, 21 nt, synthetic construct
  modified_base 20..21: mod_base = OTHER; note = thymine
  misc_feature 1..21: note = Description of Artificial Sequence: Synthetic oligonucleotide
  misc_feature 1..21: note = Description of Combined DNA/RNA Molecule: Synthetic oligonucleotide
  source 1..21: mol_type = other RNA
agggctgaactttgacttctt

SEQ ID NO: 1626 - RNA, 21 nt, synthetic construct
  modified_base 20..21: mod_base = OTHER; note = thymine
  misc_feature 1..21: note = Description of Artificial Sequence: Synthetic oligonucleotide
  misc_feature 1..21: note = Description of Combined DNA/RNA Molecule: Synthetic oligonucleotide
  source 1..21: mol_type = other RNA
acagtgagctcattgatggtt

SEQ ID NO: 1627 - RNA, 21 nt, synthetic construct
  modified_base 20..21: mod_base = OTHER; note = thymine
  misc_feature 1..21: note = Description of Artificial Sequence: Synthetic oligonucleotide
  misc_feature 1..21: note = Description of Combined DNA/RNA Molecule: Synthetic oligonucleotide
  source 1..21: mol_type = other RNA
aagataatagtgttcagagtt

SEQ ID NO: 1628 - RNA, 21 nt, synthetic construct
  modified_base 20..21: mod_base = OTHER; note = thymine
  misc_feature 1..21: note = Description of Artificial Sequence: Synthetic oligonucleotide
  misc_feature 1..21: note = Description of Combined DNA/RNA Molecule: Synthetic oligonucleotide
  source 1..21: mol_type = other RNA
taaatggtgttaaccagcatt

SEQ ID NO: 1629 - RNA, 21 nt, synthetic construct
  modified_base 20..21: mod_base = OTHER; note = thymine
  misc_feature 1..21: note = Description of Artificial Sequence: Synthetic oligonucleotide
  misc_feature 1..21: note = Description of Combined DNA/RNA Molecule: Synthetic oligonucleotide
  source 1..21: mol_type = other RNA
aaaactggttctttcctcttt

SEQ ID NO: 1630 - RNA, 21 nt, synthetic construct
  misc_feature 1..21: note = Description of Artificial Sequence: Synthetic oligonucleotide
  misc_feature 1..21: note = Description of Combined DNA/RNA Molecule: Synthetic oligonucleotide
  source 1..21: mol_type = other RNA
  modified_base 20..21: mod_base = OTHER; note = thymine
tcttccacagggctgggcatt

1. A double-stranded ribonucleic acid (dsRNA) for inhibiting expression of Serpinc1, wherein said dsRNA comprises a sense strand and an antisense strand, wherein said sense strand comprises at least 15 contiguous nucleotides differing by no more than 3 nucleotides from the nucleotide sequence of SEQ ID NO:1 and said antisense strand comprises at least 15 contiguous nucleotides differing by no more than 3 nucleotides from the nucleotide sequence of SEQ ID NO:5.

2. A double-stranded ribonucleic acid (dsRNA) for inhibiting expression of Serpinc1, wherein said dsRNA comprises a sense strand and an antisense strand, the antisense strand comprising a region of complementarity which comprises at least 15 contiguous nucleotides differing by no more than 3 nucleotides from any one of the antisense sequences listed in any one of Tables 3, 4, 8, 11, 12, 14, 15, 20, and 21.

3. The dsRNA of claim 1, wherein said dsRNA comprises at least one modified nucleotide.

4. The dsRNA of claim 1, wherein the dsRNA comprises a sense strand consisting of a sense strand sequence selected from the sequence of any one of Tables 3, 4, 8, 11, 12, 14, 15, 20, and 21, and an antisense strand consisting of an antisense sequence selected from the sequences of any one of Tables 3, 4, 8, 11, 12, 14, 15, 20, and 21.

5. A cell containing the dsRNA of claim 1.

6. A vector encoding at least one strand of a dsRNA, wherein said dsRNA comprises a region of complementarity to at least a part of an mRNA encoding Serpinc1, wherein said dsRNA is 30 base pairs or less in length, and wherein said dsRNA targets said mRNA for cleavage.

7. A pharmaceutical composition for inhibiting expression of a Serpinc1 gene comprising the dsRNA of claim 1.

8. A method of inhibiting Serpinc1 expression in a cell, the method comprising:
(a) contacting the cell with the dsRNA of claim 1; and
(b) maintaining the cell produced in step (a) for a time sufficient to obtain degradation of the mRNA transcript of a Serpinc1 gene, thereby inhibiting expression of the Serpinc1 gene in the cell.

9. A method of treating a subject having a disorder that would benefit from reduction in Serpinc1 expression, comprising administering to the subject a therapeutically effective amount of the dsRNA of claim 1, thereby treating said subject.

10. A method of preventing at least one symptom in a subject having a disorder that would benefit from reduction in Serpinc1 expression, comprising administering to the subject a therapeutically effective amount of the dsRNA of claim 1, thereby preventing at least one symptom in the subject having a disorder that would benefit from reduction in Serpinc1 expression.

11. The method of claim 9, wherein the disorder is a bleeding disorder.

12. The method of claim 11, wherein the bleeding disorder is a hemophilia.

13. A method of inhibiting the expression of Serpinc1 in a subject, the method comprising
administering to said subject a therapeutically effective amount of the dsRNA of claim 1, thereby inhibiting the expression of Serpinc1 in said subject.

14. A method of making the double-stranded ribonucleic acid (dsRNA) of claim 1, the method comprising:
(a) synthesizing a sense strand of the dsRNA;
(b) synthesizing an antisense strand of the dsRNA; and
(c) annealing the sense strand and the antisense strand,
thereby making the dsRNA.

15. The method of claim 14, wherein step (a) or step (b) comprises synthesizing a sense strand and/or an antisense strand comprising at least one modified RNA nucleotide.

16. The method of claim 14, wherein step (a) or step (b) comprises synthesizing a sense strand and/or an antisense strand conjugated with a ligand.
